United States Patent Application Publication US 2023/0380449 A1 - sequence listing, part 2

SEQ ID NO: 4784 - DNA, 490 bp, Unknown
  Ascusbbf_633303, encodes 16S rRNA
agagtttgatcatggctcaggatgaacgctggcggcgtgcttaacacatgcaagtcgagcgagaaatattcaaacgattcttcggatgaaattgaatatggacagcggcggacgggtgagtaacgcgtgggaaacctgccttatacaaagggatagcctcgggaaaccgggattaataccttatgacacttcactaccgcatggtagagaagtcaaaactccggtggtataagatggtcccgcgtcccattagctagttggtgagataaaagctcaccaaggcgacgatgggtagccggccttagcgggtgaacggccacactggaactgagacacggtccagactcctacgggaggcagcagtggggaatattgcacaatggaggaaactctgatgcagcgacgccgcgtgagtgatgaaggccctagggttgtaaagctctttcggcggggacgataatgacggtacccgcagaagaagccccggcta

SEQ ID NO: 4785 - DNA, 490 bp, Unknown
  Ascusbbf_905937, encodes 16S rRNA
agagtttgatcctggctcagaacgaacgctggcggcaggcttaacacatgcaagttgagcgggaactgagggtagcttgctacttgaggggagagcagcgtactggtgagtaacacgtgggaacataccttttggtgggggacaacagttggaaacgactgctaataccgcataagccctaagggggaaagattaattgccgaaagattggcccgcggaagattaggtagtaggtggggtaacggcccaccaaggcgacgatcagtaggggttctgagaggaaggtcccccacattgggactgagatacggcccagactcctacgggaggcagcagtcgggaatattgcgcaatggaggaaactctgacgcagtgacgccgcgtgcaggaagaaggttttcggatcgtaaagctctgttattggggaagaagaagtgacggtacccaatgaggaagtcccggctaattacgtgccagcagccgcggtaat

SEQ ID NO: 4786 - DNA, 490 bp, Unknown
  Ascusbbf_1171616, encodes 16S rRNA
agagtttgatcatggctcaggacgaacgctggcggcgtgcttcatacatgcaagtcgaacgataaggtctcttcggagacacataagtggcggacgggtgagtaatgtgtagagaatctgccctagagtgggggacaacagttggaaacgactgctaataccgcatatgcgcgtagctgagatgctattcgtgaaaactccggtgctctgggatgagtctgcatctgattagctagttgggggtgtaatggctcacctaggcgacgatccctagctggtctgagaggatgaccagccacactggaactgagacacggtccagactcctacgggaggcagcagtggggaatattgcacaatgggcgcaagcctgatgcagccatgccgcgtgtatgaagaaggccttcgggttgtaaagtactttcagcgaggaggaaggcgttaaggttaataaccttggcgattgacgttactcgcagaagaagcacag

SEQ ID NO: 4787 - DNA, 490 bp, Unknown
  Ascusbbf_1429182, encodes 16S rRNA
agagtttgatcatggctcagaatgaacgttggcggcgtggattaggcatgcaagtcgagcgagaacccgcaagggggacagcggcaaacggggtagtaatgtgtcggaacgtgcccagaggacggggatagcggcgggaaactgccggtaatacccgatgatctcgagagagcaaaggtgtgattccgcctttggagcggccgacatggtattagctagttggcggggtaacggcccaccaaggctttgatgcctaggggatgtgagagcatgatccccaccattgggactgagacactgcccagacacctacgggtggctgcagtcgagaatcttcgtcaatgggcgaaagcctgaacgagcgacgccgcgtgtgggatgaaggcccttgggttgtaaaccactgtcgagggggatgaaggcttgaaggtactccttcaagtttgacagagccctggaggaagcacgggctaagttcgtgccagcagcc

SEQ ID NO: 4788 - DNA, 490 bp, Unknown
  Ascusbbf_1430090, encodes 16S rRNA
agagtttgatcctggctcagattgaacgctggcggaatgctttacacatgcaagtcgagcggcagcgcggggcaacctggcggcgagcggcgaacgggtgagtaatacatcggaacgtgcccagacgtgggggataactactcgaaagagtggctaataccgcatacgatctgaggatgaaagcgggggatcgcaagacctcgcgcgtctggagcggccgatggcagattaggtagttggtgaggtaaaggcttaccaagcctgcgatctgtagctggtctgagaggatgatcagccacactgggactgagacacggcccagactcctacgggaggcagcagtggggaattttggacaatgggcgaaagcctgatccagccattccgcgtgcaggatgaaggccctcgggttgtaaactgcttttgtacggaacgaaaaagctccggctaatacctggagtccatgacggtaccgtaagaataagcaccg

SEQ ID NO: 4789 - DNA, 490 bp, Unknown
  Ascusbbf_917230, encodes 16S rRNA
agagtttgatcctggctcagaacgaacgctggcggcatgcctaacacatgcaagtcgaacgagaccttcgggtctagtggcgcacgggtgcgtaacacgtgggaacctgcccttaggttcggaataactcaccgaaaggtgtgctaataccggataatgtcttcggaccaaagatttatcgcctttggatgggcccgcgtaggattagctagttggtgaggtaatggctcaccaaggcgacgatccttagctggtcttagaggatgatcagccacactgggactgagacacggcccagactcctacgggaggcagcagtagggagttttcggcaatgggcgaaagcctgaccgagcaacgccgcgtgagtgagaaggtcttcggattgtaaagctctgttacgagggacgaacggtggggtcaggaaatgggccccaattgacggtacctcgccagaaagtgacggctaactacgtgccagcagccgcgg

SEQ ID NO: 4790 - DNA, 490 bp, Unknown
  Ascusbbf_1355149, encodes 16S rRNA
agagtttgatcctggctcaggatgaacgctggcggcgtgcctaatacatgcaagtcgaacgagagtagcaatactctagtggcgaacgggtgagtaacacgtagataacctgccctaaagacgaggataacaccgggaaactggagctaaaactggataggacaatttgaggcatcttaaattgtttaaaggaccagcaatggtacactttaggaggggtctgcggcgcattagttagttggtagggtaatggcctaccaagacagtgatgcgtagccggactgagaggtcaaacggccacattgggactgagaacggcccaaactcctacgggaggcagcagaagggaattttcggcaatggggggaaccctgaccgagcaacgccgcgtgaatgacgaagttcttcggaatgtaaagttcttttattagtgaagaatggcagatggaaaaatctgaatgacggtaactaatgaataagccccggctaa

SEQ ID NO: 4791 - DNA, 490 bp, Unknown
  Ascusbbf_1016817, encodes 16S rRNA
agagtttgatcatggctcaggatgaacgctggcggcgtgcctcagacatgcaagtcgaacgattaagacttccttcgggaagtgtataaagtggcgcacgggtgagtaacacgtaagtaatctgccctcgagtggggaataacgttcggaaacgaacgctaataccgcataacgcagcggcaccgcaaggtgacagttgttaaaggagtaattcgcttgaggaggagcttgcggcagattagcttgttggtaaggtaacggcttaccaaggctacgatctgtatccggtctaagaggacggtcggacacactgacactgaataacgggtcagactcctacgggaggcagcagtcgggaattttgggcaatgggcgaaagcctgacccagcaacgccgcgtgaaggatgaagtatttcggtatgtaaacttcgaaagaataggaagaataaatgacggtactatttataagctccggctaactacgtgcca

SEQ ID NO: 4792 - DNA, 470 bp, Unknown
  Ascusbbf_974811, encodes 16S rRNA
agagtttgatcctggctcagaacgaacgctggcggcaggcttaacacatgcaagtcgaacgatgtagcaatacatagtggcgcacgggtgagtaacgcgtgggaatgtaccttttggtggggaataactccgggaaactggagctaataccgcatacgcccttcgggggaaagatttatcgccaaaagatcagcccgcgtgagattaggtagttggtggggtaatggcctaccaagcctacgatctctagctggtcttagaggatgaccagccacactggaactgagacacggtccagactcctacgggaggcagcagtggggaatattggacaatgggcgaaagcctgatccagccatgccgcgtgagtgatgaaggctctagggttgtaaagctctttcgccgatgaagataatgacggtagtcggagaagaagccccggctaacttcgtgccagcagccgcggtaat

SEQ ID NO: 4793 - DNA, 206 bp, Unknown
  Ascusbbf_964744, encodes 16S rRNA
agagtttgatcctggctcagcagccgcggtaatgccagcagccgcggtaatctgtctcttatacacagagtttgatcatggctcagccagcagccgcggtaatagagtttgatcatggctcagcagccgcggtaatgccagcagccgcggtaatctgtctcttatacacagagtttgatcatggctcagccagcagccgcggtaat

SEQ ID NO: 4794 - DNA, 488 bp, Unknown
  Ascusbbf_558401, encodes 16S rRNA
agagtttgatcctggctcagggctaacgctggcggcgcgcctaacacatgcaagtcgaacgggcacttcggtgctagtggcagacgggtgagtaacgcgtggataatgtgcctctttgctggggataccgtttcgaaaggaacgttaataccgaatgtgctgaatttgtggcatcacagattgagtaaactgttagggtgaagagagcggtccgcgttctatcagcttgttggtggggtaatggcctaccaaggctacgacggataactggtctgagaggatgatcagtcacactggaactgagacacggtccagactcctacgggaggcagcagtgaggaatcttgcacaatgggcgaaagcctgatgcagcgacgccgcgtgagggacgaaggccttcgggttgtaaacctctgtcagtggggaagaagaatgacggtacccactgaggaagcttcggctaactacgtgccagcagccgcggtaat

SEQ ID NO: 4795 - DNA, 490 bp, Unknown
  Ascusbbf_906955, encodes 16S rRNA
agagtttgatcctggctcaggacgaacgctggcggcgtgcctaacacatgcaagtcgaacggaaaattgagcttcggttcaatttttagtggcgaacgggtgagtaacgcgtaggcaacctgccctttagacggggacaacattccgaaagggatgctaataccggatgtgacgctcctatcgcatgacgggagcgtgaaagatggcctctacacgtaagctatcgctaaaggatgggcctgcgtctgattagctagttggtagtgtaacggacaaccaaggcgatgatcagtagccggtctgagaggatgaacggccacattgggactgagacacggcccaaactcctacgggaggcagcagtggggaatattgcacaatgggggaaaccctgatgcagcgatgccgcgtgaaggaagaagtatctcggtatgtaaacttctatcagcagggaagaaaatgacggtacctgactaagaagccccggcta

SEQ ID NO: 4796 - DNA, 490 bp, Unknown
  Ascusbbf_1372541, encodes 16S rRNA
agagtttgatcctggctcaggatgaacgctagcggcaggcttaacacatgcaagtcgaggggtaacgcggggtagcaatactctggcgacgaccggcgcacgggtgcgtaacgcgtatgcaacctacctgtaacaggggtataacggagagaaatttccactaatcccccatattgttattctttcgcatgttaggataacgaaagcttcggtggttacggatgggcatgcgtgacattagctagttggtaagttaccggcttacaaaggcgacgatgtctaggggatctgagaggcttatcaccagaactggtccttggcaacggaccagactcctacggtaggcagcagtgaggaatattggtcaatggacggaagtctgaaccagccatgccgcgtggaggaagaaggtcctatgggttgtaaactccttttgttcgagagtaataagggctttgcgaagcccgatgagagtatcggacgaataagc

SEQ ID NO: 4797 - DNA, 490 bp, Unknown
  Ascusbbf_936257, encodes 16S rRNA
agagtttgatcttggctcaggacgaacgctggcggcgtgcctaacacatgcaagtcgagcgagaatttctgaaatgaattcttcggaaggaattttgggaaggaaagcggcggacgggtgagtaacgcgtgagtaacctgcctatcagagggggacaacatttcgaaaggaatgctaataccgcatgaaattgtattatcgcatgatagaacaatcaaagatttatcgctgatagatggactcgcgtctgattagatagttggtggggtaaagacctaccaagtcgacgatcagtagccgaactgagaggttgatcggccacattgggactgagacacggcccagactcctacgggaggcagcagtggggaatattgcgcaatgggggcaaccctgacgcagcaacgccgcgtgaaggatgaaggttttcggattgtaaacttctgatctaagggaaaaagagagtgatggtaccttaggagcaagctac

SEQ ID NO: 4798 - DNA, 210 bp, Unknown
  Ascusbbf_658728, encodes 16S rRNA
agagtttgatcatggctcaggcagagctggcaaaacgcggtctgaatgaaactgaagtccgcgcacgccttgtccagaacggcattgacgtagataatctgaagccttcagactacgcatcttaccaggcaagaatcatgcagattctggatcagatgcaggcagaaaaagctggcactgcagcaaccacaggccagcagccgcggtaat

SEQ ID NO: 4799 - DNA, 490 bp, Unknown
  Ascusbbf_1701138, encodes 16S rRNA
agagtttgatcctggctcaggacgaacgctggcggcgtgcctaacacatgcaagtcgagcggaggcatacaaggagcaatctgcgtatgtttcagcggcggacgggtgagtaacgcgtgggcaacctgcctttcactgggggataacgcggcgaaagccgcactaataccgcataagaccccgagggccgcatggcctgggggtcaaaggagcaatccggtggaagatgggcccgcgtccgattaggtagttggtggggtaaaggcctaccaagcctgagatcggtagccgacctgagagggtgatcggccacactggaactgagacacggtccaaactcctacgggaggcagcagtgaggaatattggtcaatgggcgagagcctgaaccagccaagtagcgtgcgggacgaaggccctatgggttgtaaaccgcttttacggggggataaagtgagtgacgtgtcattcattgcaggtaccccgcgaa

SEQ ID NO: 4800 - DNA, 490 bp, Unknown
  Ascusbbf_1244224, encodes 16S rRNA
agagtttgatcctggctcagaacgaacgctggcggcgtgcctaacacatgcaagtcgaacgagaaagtccttcgggatgagtatagtggcgcacgggtgagtaatacataggaacgtacctctaggtggggaataaccaagggaagccttggctaataccgcatgatatcgcaagatcaaaggtggcctctacctgtaagctaccgccaagagatcggcctatgtcccattagctagttggcgaggtaatagctcaccaaggcgacgatgggtagctggtctgagaggacgatcagccacactggaactgagacacggtccagactcctacgggaggcagcagtgaggaatattggtcaatgggcgagagcctgaaccagccaagtagcgtgcaggaagacggccctatgggttgtaaactgcttttataggggaataaagtgagccacgtgtggttttttgcatgtaccctatgaataaggaccggcta

SEQ ID NO: 4801 - DNA, 490 bp, Unknown
  Ascusbbf_1243638, encodes 16S rRNA
agagtttgatcctggctcaggatggacgctggcggcgtgcctaacacatgcaagtcgaacgaggctcttccgactgatgattcgtctgaagacggaagatcaccgagtggcggatgggtgagtaacgcgtggagaacctgcccttatcagggggataacaactggaaacggttgacaataccgcataaagcaactgaccgcatgatcggttgcgaaaagatttatcggataaggatggctccgcgtcggattagctagttggtgaggtaacggcccaccaaggcgacgatccgtagccggcctgagagggcgaccggccacattgggactgagacacggcccagactcctacgggaggcagcagtggggaatattgcacaatgggcgcaagcctgatgcagcgacgccgcgtgagtgaagaagtatttcggtatgtaaagctctatcagcagggaagaaaatgacggtacctgcacaagaagccccggct

SEQ ID NO: 4802 - DNA, 490 bp, Unknown
  Ascusbbf_1679985, encodes 16S rRNA
agagtttgatcctggctcaggacgaacgctggcggcgtgcttaacacatgcaagtcgagcggaaaggccctttcgggggtactcgagcggcgaacgggtgagtaacacgtgagtaatctgcccttcacttcgggataactaccggaaacggtggctaataccggatatgaccacgtctcgcatggggtgtggtggaaagcgtttagcggtgggggatgtgctcacggcctatcagcttgttggtgaggtagtggctcaccaaggcttcgacgggtagccggcctgagagggtgaccggccacactgggactgagacacggcccagactcctacgggaggcagcagtggggaatattggacaatgggcggaagcctgatccagcaacgccgcgtgagggatgacggccttcgggttgtaaacctctttcacctatgacgaagcgagagtgacggtagtaggagaagaagcaccggccaactacgtgccagc

SEQ ID NO: 4803 - DNA, 490 bp, Unknown
  Ascusbbf_1528671, encodes 16S rRNA
agagtttgatcctggctcaggatgaacgctggcggcatgcctaagacatgcaagtcgtacgaggaggcccattgaaatggagtgattgcacaaagtggatttggattccctcctagtggcggaagggtgagaaatacgtaggttatttgcctcagagactgggataacatgcagaaatgcttgctaataccggatgataaatagaatggtacgttgttctattttaaaaggtgcctctaaagcaccactttgagagaagcctgcggcgtattagctagttggtgaggtaatggcccaccaaggcttcgatgcgtagccgacctgagagggtgatcggccacactgggactgagacacggcccagactcctacgggagacagcagttaggaatattcgtcaatgggggcaaccctgaacgagcaacgccgcgtgaaggaagaaggtcttcggattgtaaacttcttttatgagggacgaaggacgtgacgg

SEQ ID NO: 4804 - DNA, 490 bp, Unknown
  Ascusbbf_1542833, encodes 16S rRNA
agagtttgatcctggctcagaacgaacgctgatggcgtgcctcatacatgcaagtcgagcgccccgcaaggggagcggcgaacgggtgagtaacgcgtgaacaatctgcctcaaagtgggggataaccattccaacggatggctaataccgcatagggtttggaagtggcatcacttctttacgaaagcatttatgcgctttgagatgagttcgcgtcccattagctagttggcggggtaacggcccaccaaggcaacgatgggtagccggcctgagagggtgtccggccacattgggactgagatacggcccagactcctacgggaggcagcagtagggaattttgcgcaatgggggaaaccctgacgcagcaacgccatgtgtgggatgaagcatttcggtgtgtaaaccactgtcggcagggaataaagcccacgtttacgtgggggtgaatgtacctgcagaggaagccccggctaacttcgtgcc

SEQ ID NO: 4805 - DNA, 490 bp, Unknown
  Ascusbbf_1372268, encodes 16S rRNA
agagtttgatcctggctcaggacgaacgctggcggcatgcttcatacatgcaagtcgaacgataaggtctcttcggaggtacataagtggcggacgggtgagtaatatgtaggtaatctgccctagagagggggacaacagagggaaacttctgctaatacctcatatgagcgtacctgaaatggtattcttgaaaactccggtgccctctggggagccaacatctgattagctagttggcgggttaatggaccaccaagtcgacgatcagtagctggtttgagagtttgatcagccacaatgggacggggagacggcccaggctataccggaagacagcagaaaggaattttgcgcaatgggggatggcctaaggcagccatgccgcgggaacgtagaagcccatcggagtgtgacgttgtataagtagaggcgaattttgacggtacctacagaggaagcaccggctaactccgtgccagcagccgcg

SEQ ID NO: 4806 - DNA, 490 bp, Unknown
  Ascusbbf_1436436, encodes 16S rRNA
agagtttgatcctggctcaggatgaacgccggcggcgtgcttaacacatgcaagtcgaacgaggtataagaacggaagttttcggacggaagatcttgtactgagtggcggacgggtgagtaacgcgtgggaaacctgccctgttccgggggataccagttggaaacgactgttaataccgcataagcgcacagcaccgcatggtgcagtgtgaaaaactccggtggaacaggatggtcccgcgtctgattaggcagttggcagggtaactgcctaccaaaccgacgatcagtagccggcctgggaaggggaacggcgaccttacgacggcgacacggaccaaactcctacgggaggcagcagtggggaatattgcacaataggggtaaccctgatgcggcgacgccgcgtgagggaagaagtatttcggtatggaaagctctatcagcagggaagaagatgacggtacctgcagaagcagccccggcta

SEQ ID NO: 4807 - DNA, 470 bp, Unknown
  Ascusbbf_1661871, encodes 16S rRNA
agagtttgatcatggctcagaacgaacgctggcggcaggcttaacacatgcaagtcgaacgccccgcaaggggagtggcagacgggtgagtaacgcgtgggaatctacccagttctacggaacaacacagggaaacttgtgctaataccgtatacgccctacgggggaaagatttatcggaattggatgagcccgcgttggattagctagttggtgaggtaaaggctcaccaaggcgacgatccatagctggtctgagaggatgatcagccacacggggactgagacacggccccgactcctacgggaggcagcagctaagaatcttgcgcaatgggcgaaagcctgacgcagcaacgccgcgtgggggaggaaggccttcgggttgtaaaccccttttgtgagggaagaaattttgacggtacctcacgaataagccacggctaactacgtgccagcagccgcggtaat

SEQ ID NO: 4808 - DNA, 490 bp, Unknown
  Ascusbbf_898363, encodes 16S rRNA
agagtttgatcctggctcagaacgaacgctggcggcaggcttaacacatgcaagtcgagcgatcccttcggggatagcggcggacgggtgagtaacgcgtgggaacgtgcccttttcttcggaatagcccagggaaacttggattaataccggatacgcccttcgggggaaagatttatcgggaaaggatcggcccgcgttggattagatagtaggcggggtaacggcccacctagtcgacgatcagtaggggttctgagaggaaggtcccccacattggaactgagacacggtccaaactcctacgggaggcagcagtgaggaatattggtcaatggacgagagtctgaaccagccaagtagcgtgaaggaagactgccctatgggttgtaaacttcttttgtttgggaataaagtgggccacgtgtggccttttgtatgtaccatacgaataagcatcggctaattccgtgccagcagccgcggtaat

SEQ ID NO: 4809 - DNA, 490 bp, Unknown
  Ascusbbf_822223, encodes 16S rRNA
agagtttgatcatggctcaggatgaacgctagcggcaggcctaatacatgcaagtcgaacgggatccatgagtagcttgctacttatggtgagagtggcgcacgggtgcgtaacgcgtgagcaacctacccatatcagggggatagcccggagaaatccggattaataccgcatgcaaccattttgtggcatcataagatggttaaatatttataggatatggatgggctcgcgtgacattagctagttggtgaggtaacggctcaccaaggcaacgatgtctagggtctctgagaggagaatcccccacactggtactgagacacggaccagactcctacgggaggcagcagtaaggaatattggtcaatggagggaactctgaaccagccatgccgcgtgcaggatgactgccctatgggttgtaaactgcttttatcagggaataaatgttagtacgtgtactaatttgaatgtacctgaagaataa

SEQ ID NO: 4810 - DNA, 490 bp, Unknown
  Ascusbbf_990186, encodes 16S rRNA
agagttgatcatggctcaggatgaatgctggcggcgtgcctaatacatgcaagtcgagcggtaacagggcttcaccgtgttcttgacgcacttggccatagagcaagtagctgatttcgaggacacagtgaagctgctgacgagcggcggacggctgagtaacgcgtgggaacggaccccaaactgagggataactagtcgaaagattagctaataccgcatgtgatcttcggattaaaggatttatccggtttgggactggcctgcgtacgattagatagttggtagggtaatggcctaccaagtcaacgatcgttagatggtttgagaagatgatcatccagactgggactgagacacggcccagactcctacgggaggcagcagtagggaatctttcacaatgggcgaaagcctgatggagcaacgccgcgtgcaggatgacggccttcgggttgtaaactgcttttataagcgagaaatatgatgg

SEQ ID NO: 4811 - DNA, 349 bp, Unknown
  Ascusbbf_600956, encodes 16S rRNA
agagtttgatcatggctcaggatgaacgctggcggcgtgcttaacacatgcaagtaggtgatataagatggacccgcgttggattagtcagttggcagggtaacggcctaccaaagcgacgatccatagccggcctgagagggtgaacggccacattgggactgagacacggcccagactcctacgggaggcagcagtggggaatattgcacaatgggggaaaccctgatgcagcgacgccgcgtgaaggaagaagtatctcggtatgtaaacttctatcagcagggaagaaaatgacggtacctgactaagaagccccggctaactacgtgccagcagccgcggtaat

SEQ ID NO: 4812 - DNA, 480 bp, Unknown
  Ascusbbf_1373642, encodes 16S rRNA
agagtttgatcctggctcagaacgaacgctggcggcaggcctaacacatgcaagtcgaacgtgaagcatccttcgggatgtggaaagtggcagacgggtgagtaacgcgtgggaatttacctaatggtacgggatagctcagggaaacttggatcaataccgtataagccctccgggggaaagatttatcgccattagagaagcccgcgttagattagcttgttggtgaggtaacggctcaccaaggcgacgatctatagctggtctgagaggatgatcagccacactgggactgagacacggcccagactcctacgggaggcagcagtggggaatattgcacaatgggcgaaagcctgatgcagccatgccgcgtgagtgacgaaggccttagggttgtaaagctctttcaccggtgaagataatgacggtagccggagaagaagccccggctaactccgtgccagcagccgcggtaat

SEQ ID NO: 4813 - DNA, 490 bp, Unknown
  Ascusbbf_467461, encodes 16S rRNA
agagtttgatcatggctcaggatgaacgctagctacaggcttaacacatgcaagtcgaggggcagcatgaaagtagcttgctacttttgatggcgaccggcgcacgggtgcgtaacgcgtatccaactttcccgttactctcggatagccttccgaaagggagattaatacgagatggtgtctttatttcgcatgttatgaagactaaagatttattggtaacggatagggatgcgtgacattagatagttggcggggtaacggcccaccaagtccacgatgtctaggggttctgagaggaaggtcccccacactggaactgagacacggtccagactcctacgggaggcagcagtgaggaatattggtcaatggccgagaggctgaaccagccaagtagcgtgaaggatgaaggttctatggattgtaaacttcttttatacgggaataacatcacctacgtgtaggtgcctgcatgtaccgtatgaat

SEQ ID NO: 4814 - DNA, 488 bp, Unknown
  Ascusbbf_1347039, encodes 16S rRNA
agagtttgatcctggctcaggacgaacgctggcggcgtgcttaacacatgcaagttgagcgggaatagttgatagcttgctattgactatgagagcagcgcactggtgagtaacacgtgggaacataccttttggtgggggacaacagagggaaacttctgctaataccgcataagccctaagggggaaagattaattgccgaacgattggcccgcggaagattaggtagtaggtggggtaacggcctacctagccgacgatctatagctggtctgagaggacgaacagccacattggaactgagacacggtccagactcctacggggggcagcaggggggaatattgggcagtggaggcaactctgacacagccatgccgcgtgagtgaagaaggttttcggagtgtaaagctctttcagacgggaagatgatgacggtaccgtcagaagaagcaccggctaacttcgtgccagcagccgcggtaat

SEQ ID NO: 4815 - DNA, 472 bp, Unknown
  Ascusbbf_1440192, encodes 16S rRNA
agagtttgatcctggctcaggatgaacgctagctacaggcttaacacatgcaagtcgaacgcatgccttttggcatgagtggcgcacgggtgagtaccgcgtgggaaccgaccctggggttggggataaccgctggaaacggcggctaatacccgatacgccttacgagggaaagatttattgcccttggacgggcccgcgttggattaggtagttggtggggtaacggcctaccaagcctgcgatccatagctggtttgagaggatgatcagccacactgggactgagacacggcccagactcctacgggaggcagcagtggggaatattggacaatgggggcaaccctgatccagccatgccgcgtgagtgaagaaggccttagggttgtaaagctctttcagtggtgaagatgatgacggtagccacagaagaagccccggctaactccgtgccagcagccgcggtaat

SEQ ID NO: 4816 - DNA, 490 bp, Unknown
  Ascusbbf_1655099, encodes 16S rRNA
agagtttgatcctggctcaggatgaacgctggcggcgtgcctaatacatgcaagtcgaacggagcaccttggtgctaagtggcgaacgggtgaggagaacataggtaacctgcccctccgagggggacaacagctggaaacggctgctaagaccgcatagacgcattcagggcatcctggatgcgctaaatgaccggatggtcagcggggggatggacctatgcagtattagctagttggcggggcaacggcccaccaaggcgacgatacttagccggcctgagagggcggacggccacactgggactgagacacggcccagactcctacgggaggcagcagctaaggatcttccgcaatgggcgaaagcctgacggagcgacgccgcgtgagtgaggaagtatttcggtatgtaaagctctatcagcagggaagaaaatgacggtacctgactaagaagccccggctaactacgtgccagcagccgcgg

SEQ ID NO: 4817 - DNA, 469 bp, Unknown
  Ascusbbf_1705376, encodes 16S rRNA
agagtttgatcatggctcagattgaacgctggcggcaggcctaacacatgcaagtcgaacgaagtcttcggacttagtggcgcacgggtgagtaacacgtgggaacatacctttcggtgggggataacatcgggaactgatgctaataccgcatacgccccttgggggaaagatttatcgccgaaagattggcccgcgtccgattagctagttggtgaggtaacggctcaccaaggctccgatcggtagctggtctgagaggatgaccagccacactgggactgagacacggcccagactcctacgggaggcagcagtggggaatattggacaatgggcgcaagcctgatccagccatgccgcgtgagtgatgaaggccttagggttgtaaagctctttcacccacgacgatgatgacggtagtgggagaagaagccccggctaacttcgtgccagcagccgcggtaat

SEQ ID NO: 4818 - DNA, 468 bp, Unknown
  Ascusbbf_1444829, encodes 16S rRNA
agagtttgatcctggctcagaacgaacgctggcagcaggcttaacacatgcaagtcgagcgcgtagcaatacgagcggcagacgggtgagtaacgcgtgggaatctaccccttactacggaataacgcagggaaacttgtgctaataccgtatgtggccgagaggcgaaagatttatcggtaagggatgagcccgcgttggattagctagttggtggggtaaaggcctaccaaggcgacgatccatagcaggcctgagaggatgatcagccacactgggactgagacacggcccagactcctacgggaggcagcagtggggaatattggacaatgggcgcaagcctgatccagccataccgcgtgagtgatgaaggccctagggttgtaaagctctttcaccggtgaagataatgacggtaaccggagaagaagccccggctaacttcgtgccagcagccgcggtaat

SEQ ID NO: 4819 - DNA, 490 bp, Unknown
  Ascusbbf_1666566, encodes 16S rRNA
agagtttgatcctggctcaggacgaacgctggcggcgtgcctaacacatgcaagtcgaacgagaagtcttttaatgattccttcggggagatttaaaagatggacagtggcggacgggcgagtaacgcgtgagtaacctgcccataagtgagggatagcccatggaaacgtggagtaatacctcatattgtatactggtcacatgacctatatatgaaagatttatcgcttatggatggactcgcgtctgattagatagttggtgaggtaacggctcaccaagtcgacgatcagtagccgaactgagaggttgatcggccgcattgggactgagacacggcccagactcctacgggaggcagcagtggggaatattgcgcaatgggggaaaccctgacgcagcaacgccgcgtgcaggaagaaggtcttcggattgtaaactgttgtcgcaagggaagaagacagtgacggtaccttgtgagaaagtcac

SEQ ID NO: 4820 - DNA, 490 bp, Unknown
  Ascusbbf_1111366, encodes 16S rRNA
agagtttgatcctggctcaggacgaacgctggcggcgggcttaacacatgcaagtcgaaggagaaggaaggcgcttgcgccttctggagactggcggacgggtgagtaacgcgtagataacctgcctatacctgggggataacatctcgaaagaggtgctaataccgcataatgcagcggggccgcatggccacagttgttaaaggtttcggccgggtatagaggggtctgcgtgctattagttagttggtgaggtaacggctcaccaaggcgatgatagctagggggtctgagaggatgatcccccacactgggactgagacacggcccagactcctacgggaggcagcagtgaggaatattggtcaatgggcgagagcctgaaccagccaagtagcgtgcaggatgacggccctatgggttgtaaactgcttttgtatggggataaagtgctccacgtgtggagttttgtaggtaccatacgaataag

SEQ ID NO: 4821 - DNA, 490 bp, Unknown
  Ascusbbf_1778973, encodes 16S rRNA
agagtttgatcatggctcaggacgaacgctggcggcgtgcttaacacatgcaagtcgaacgctgaagcatcttcgggtgtggatgagtggcgaacgggtgagtaacacgtgggtaatctgccctgcactctgggataagccttggaaacggggtctaataccggatacgacacatggaggcatcttcgtgtgtggaaagctccggcggggggggatgggcccgcggcctgttagctagttggcggggcaacggcccaccaaggcgactatgggtagctgggttgagagaccgaccagccagattgggactgagacacggcccagactcctacgggaggcagcagtggggaatcttgcgcaatgggcggaagcctgacgcagcgacgccgcgtgcgggaggaaggccctcgggtcgtaaaccgctttcagcagggacgaggccgcaaggtgacggtacctgcagaagaagccccggctaactacgtgccag

SEQ ID NO: 4822 - DNA, 490 bp, Unknown
  Ascusbbf_1293041, encodes 16S rRNA
agagtttgatcctggctcaggacgaacgctggcggcgggcttaacacatgcaagtcgaacgctccctttggggagagtggcgcacgggtgagtaacgcgtaggcaatctacccccagctggggaataacccatcgaaagatgggctaataccgcataacgtcggatggtcgcatggccgaccgaccaaagttcaggcggctggggatgagcctgcgttggattagcttgttggtagggtaacggcctaccaaggcgacgatccatagcgggtctgagaggatgatccgccacactggcactgggacacgggccagactcctacgggaggcagcagtgaggaatattgcgcaatggacgaaagtctgacgcagccacgccgcgtgcaggaagacacccctctggggcgtaaactgcttttgtgtgagaagaacaccccgttctgcggggtctgacggtatcgcacgaataaggaccggctaactccgtgcc

SEQ ID NO: 4823 - DNA, 490 bp, Unknown
  Ascusbbf_1900212, encodes 16S rRNA
agagtttgatcatggctcaggatgaacgctggcggcgtgcctaacacatgcaagtcgaacggggcccgtggcgctcccctttggggaggggcaggggctgagtggcggacgggtgagtaacgcgtgggtaacctgccctgtacagggggataacagccggaaacggctgctaataccgcataagcgcggggggcggcatcgctccccgcggaaaactccggtggaacaggatggtcccgcgtctgattaggcagttggcagggtaacggcctaccgaaccgacgatcagtagccggcctgagagggtgaacggccacattgggactgagacacggcccaaactcctacgggaggcagcagtggggaatattgcacaatggggggaaccctgatgcagcgacgccgcgtgagtgaagaagtatttcggtatgtaaagctctatcagcagggaagaagatgacggtacctgcagaagcagccccggctaact

SEQ ID NO: 4824 - DNA, 490 bp, Unknown
  Ascusbbf_1371514, encodes 16S rRNA
agagtttgatcatggctcaggatgaacgctagcggcaggcttaacacatgcaagtcgaggggcagcgcggggtagcaatactctggcggcgaccggcggaagggtgcgtaacgcgtgagcaacttgcccgtcactgggggataggcactggaaacggtgtgtaatactccataacatatggattcacatggatttatattgaaagattcgttggtgacggatgggctcgcgtaacattagctagtcggcggggtaacggcccaccgaggctacgatgtttaggggttctgagaggaaggtacaccacactggaacacagacacggtccagagtcgtaagggaggaagaagtgagtaatattggtcaatgggcggaagcctgaactagcaatgccgcgtgcaggaataaggccctatgggtagtaaactgcttgtccttgagggaaataagggtcacgtgtggcccgatgagagtatcaggggaataagca

SEQ ID NO: 4825 - DNA, 405 bp, Unknown
  Ascusbbf_580215, encodes 16S rRNA
agagtttgatcctggctcagggatagccttccgaaagaaagattaatacctgatggtctcgtgtcgggacatcccgttgcgagtaaagattcatcggcgatggatggggatgcgtccgattagcttgtaggcggggtgacggcccaccaaggcgacgatcggtaggggctctgagaggagggtcccccacactggaactgagacacggtccagactcctacgggaggctgcagtgaggaatattggtcaatgggcgagagcctgaaccagccaagtggcgtgagggatgacggccctacgggttgtaaacctcttttgtttgggaataaagtgggccacgcgtggccttttgtatgtacctttcgaataagcatcggctaattccgtgccagcagccgcggtaat

SEQ ID NO: 4826 - DNA, 490 bp, Unknown
  Ascusbbf_1324449, encodes 16S rRNA
agagtttgatcctggctcaggatgaacgctagctacaggcttaacacatgcaagtcgaggggcagcgcggggtagcaatactttggcggcgaccggcgggagggtgcgtaacgcgtgagcaacttgcccgccactgggggataggcactggaaacggtgtgtaatactccataacatatggattcacatggattcatatggaaagattcgttggtgacggatgggctcgcgtaacattagctagtcgtcgtggtaacggcccaccgcagctacgctgtgtaggggttctgagaggaaggtcccccacattggaagtgagacacggtccagactcctacgggaggcagcagtgaggaatattggtcaatgggcggaagcctgaaccagccatgccgcgtgcaggaataaggccctatgggtcgtaaactgcttttccttgagggcaataaggatcacgtgtggttcgatgagagtatcaggggaataagca

SEQ ID NO: 4827 - DNA, 490 bp, Unknown
  Ascusbbf_1440672, encodes 16S rRNA
agagtttgatcatggctcaggatgaacgctggcggcgtgcttaacacatgcaagtcgaacggaccaaaaggagcttgctccttgcggttagtggcggatgggtgagtaacgcgtgggtaatctgccttatacaaagggataactcagagaaatctgtgctaaaaccttataagcttacacgatcatatgatcgagtaagaaaaactttagtggtataagatgagcccgcgtccgattagctagttggtgagataatggctcaccaaggcaacgatcggtagccggcctgagagggtgaacggccacactgggactgagacacggcccagactcctacgggaggcagcagtggggaatattgcacaatggggggaaccctgatgcagcaacgccgcgtgaaggatgaaggttttcggattgtaaactattgtctgcagggaagaataaagactgtacctgcaaagaaagctccggctaactacgtgccagc

SEQ ID NO: 4828 - DNA, 490 bp, Unknown
  Ascusbbf_1267999, encodes 16S rRNA
agagtttgatcatggctcaggatgagcgctgacggcgtgcctaacacatacaaatcaaacggaaaggattcttcggaattctttcagtgacggacggatgaataacgcatgggtaacctgccccatacagaggaacaacagctgaaaacggctgctaataccacataagcgcacaatgctgcatggtacagtgtaaaaaaattttatcggtatgggatggacccgcgtctgattagctagttggagaggtaacggcccaccaaggcgacaatcagtagccgacctgagagggtgaccggccacattggaactgagacacggcccaaactcctacaggaggcaacaataaaggatattgcacaatgggcgaaagcctgatgcagcgacgccgcgtgagtgaggaagtatttcggtatgtaaagctctatcagcagggaagaaaatgacggtacctgactaagaagccccggctaactacgtgccagcagcc

SEQ ID NO: 4829 - DNA, 490 bp, Unknown
  Ascusbbf_1324389, encodes 16S rRNA
agagtttgatcctggctcagattgaacgctagcggaatgctttacacatgcaagtcgaacggcagcgcaagagagcttgctctctggcggcgagtggcgaacgggtgagtaatgcatcggaacgtgcccagtagcgggggataactacgcgaaagcgtggctaataccgcatacgccctacgggggaaagggggggattcttcggaacctctcactattggagcggccgatgtcggattagctagttggtggggtaaaggcctaccaaggcgacgatccgtagctggtttgagaggacgacaggccacactggaacggagacacggccaagactcctacgggaggcagcagtggggaattttggacaatgggggcaaccctgatccagccatgccgcgtgtgtgatgaaggccttcgggttgtaaagcacttttggcagagaagaaatggtttgggttaataccctgaatcgatgacggtatctgcagaa

SEQ ID NO: 4830 - DNA, 490 bp, Unknown
  Ascusbbf_1410728, encodes 16S rRNA
agagtttgatcctggctcaggacgaacgctggcggcgtgcttaacacatgcaagtcgaacgctgaagcccacttcggtgggtggatgagtggcgaacgggtgagtaacacgtggacaatctgccctgcacttcgggataagccttggaaacgaggtctaataccgaataggacactgcatcgcatggtgtggtgtggaaagcgtttaatgcggtgtgggatgagtccgcggcctatcagcttgttggtggggtgatggcctaccaaggcgacgacgggtagccggcctgagagggtgaccggccacactgggactgagacacggcccggactcctacgggaggcagcagtggggaatattgcacaatgggggaaaccctgatgcagcgacgccgcgtgagtgaagaagtatttcggtatgtaaagctctatcagcaaggaagataatgacggtacttgactaagaagccccggctaactacgtgccagca

SEQ ID NO: 4831 - DNA, 490 bp, Unknown
  Ascusbbf_997233, encodes 16S rRNA
agagtttgatcctggctcaggatgaacgctagcgggaggcttaacacatgcaagccgagggatattgtgctttcgggcacaagagaccggcggacgggtgagtaacatgtatgcaacttgcctctatcagtgggataacccggggaaactcggactaataccgcataacaatattatcagcattgatgatatttaaaagatttatcggatagagataggcatgcgtaggattagttagttggtgaggtaaaggctcaccaagacgatgatccttagggggcctgagagggtgatcccccacactggtactgagacacggaccagactcctacgggaggcagcagtgaggaatattggacaatgggtgagagcctgatccagccatcccgcgtgcaggaagacggccctatgggttgtaaactgcttttatacaggaataaaccattttacgagtaggatgttgaaggtactgtatgaataagcatcggct

SEQ ID NO: 4832 - DNA, 490 bp, Unknown
  Ascusbbf_515327, encodes 16S rRNA
agagtttgatcatggctcaggacgaacgctggcggcgtgcctaatacatgcaagtcgagcggattgatgggagcttgctccctgatatcagcggcggacgggtgagtaacacgtgggcaacctgcctatacgactgggataacttcgggaaaccggagctaataccggataatccctttcctctcatgaggaaaggctgaaagatggcttttcgctatcacttatagatgggcccgcggcgcattagctagttggtgaggtaacggctcaccaaggcaacgatgcgtagccgacctgagagggtgatcggccacactgggactgagacacggcccagactcctacgggaggcagcagtagggaattttgcgcaatgggcgaaagcctgacgcagcaacgccgcgtgatcgtagaagcccttcggggtgtaaagatctgtcagtagggacgaacaatgactgtacctacagaggaagcaccggctaactcc

SEQ ID NO: 4833 - DNA, 490 bp, Unknown
  Ascusbbf_691089, encodes 16S rRNA
agagtttgatcctggctcaggataaacgctggcggcgtgcatgagacatgcaagccgaacgaaggatcgggcttgctcgatccttagtggcggacggctgagtaacgcgtaggtgacctaccccgaagtggggaataactgcccgaaagggtggctaataccgcatgtggtcgcacgttcattcgtgcgagtaaagccgcaaggcgcttcgggaggggcctgcgtccgattagctcgttggtggggtaatggcttaccaaggcgacgatcggtaggtggtctgagaggacgatcacccagactgggactgagacacggcccagactcctacgggaggcagcagtcgggaattttgctcaatgggggaaaccctgaagcagcaacgccgcgtgagggatgaaggccttcgggttgtaaacctcttttgtcagggacgatgatgacggtacctggcgaataagccacggctaactacgtgccagcagccgcg

SEQ ID NO: 4834 - DNA, 490 bp, Unknown
  Ascusbbf_1373002, encodes 16S rRNA
agagtttgatcctggctcaggatgaacgctagcggcaggcttaacacatgcaagtcgaggggtaacgcggggtagcaatactctggcgacgaccggcgcacgggcgcgtaacgcgtatgcaacctacctgtaacaggggtataacggagagaaatttccactaatcccccatattgttagagattcgcatgtttctctaacgaaagcttcgttggttacggttgggcaggcgtgacattagctagttggtaaggtaacgacttaccaaggcgacgatgactaggggagctgagtggcttatcccacgaatgggaacgggaaaacgtaccagcgtcctaggggaggaggaggggaggaaaatgggtcaatggacggagctcggaaccggccaggaggcgtggaggaagaagggcctatgggtggtaaactccttttgttcgagagtaataagaggcttgcgagcctagaggagagtatcggacgaataagc

SEQ ID NO: 4835 - DNA, 490 bp, Unknown
  Ascusbbf_1246230, encodes 16S rRNA
agagtttgatcctggctcaggacgaacgctggcggcgtgcttaacacatgcaagtcgagcggtaaggcccttcggggtacacgagcggcgaacgggtgagtaacacgtgagcaacctgcccctgactccgggataagcggtggaaacgccgtctaataccggatacgaccccccggatcatgccggagggtggaaagtttctcggttggggatgggctcgcggcctatcagcttgttggtggggtaaaggcctaccaaggcgattacgggtagccggcctgagagggtgaccggccacactgggactgagacacggcccagactcctgcgggaggcagcagtgaggaatattggtcaatgggcgtaagcctgaaccagccaagtagcgtgcaggatgacggccctatgggttgtaaactgcttttatgcggggataaagtcacctacgtgtaggtgtttgtaggtaccgcatgaataaggaccggctaat

SEQ ID NO: 4836 - DNA, 490 bp, Unknown
  Ascusbbf_1038556, encodes 16S rRNA
agagtttgatcctggctcaggatgaacgctggcggcgtgcttaacacatgcaagtcgaacgaggtacaaggacggaagccttcggacggaagatcttgtactgagtggcggacgggtgagtagcgcgtgggaaacctgccctgttccgggggataccagttggaaacgactgttaataccgcataagcgcacagcaccgcatggtgcagtgtgaaaaactccggtggaacaggatggtcccgcgtctgattaggcagttggggaggtaacggctcaccaaaccgatgatctctagctggtttgagaggacaatcagccacattggaattgggaaacggtccaaactcctacgggaggcagcagtggggaatattgcacaatgggggaaaccctgatgcagcgacgccgcgtgagtgaagaagtatttcggtatgtaaagctctatcagcagggaagaaaatgacggtacctgactaagaagccccggcta

SEQ ID NO: 4837 - DNA, 490 bp, Unknown
  Ascusbbf_1766882, encodes 16S rRNA
agagtttgatcatggctcaggatgaacgctggcggcgtgcttaacacatgcaagtcgaacgaagcacttaagattgactcttcggatgacgtcttttgtgacttagtggcggacgggtgagtaacgcgtgggtaacctgcctcacacagggggataacagttagaaatgactgctaataccgcataacccgataggatcgcatgatccagacggaaaagatttatcggtgtgagatggacccgcgtctggttagctagttggcggggcaacggcccaccaaggcgactatgggtagctgggttgagagaccgaccagccagattgggactgagacacggcccagactcctacgggaggcagcagtggggaatattgcacaatggaggaaactctgatgcagcgacgccgcgtgagcgatgaagtatttcggtatgtaaagctctatcagcagggaagataatgacggtacctgactaagaagcaccggct

SEQ ID NO: 4838 - DNA, 468 bp, Unknown
  Ascusbbf_1006942, encodes 16S rRNA
agagtttgatcctggctcagaacgaacgctggcggcaggcctaacacatgcaagtcgaacgatccttcgggatagtggcgcacgggtgcgtaacgcgtgggaatatgcccttgggtgcggaataacgtatggaaacgtacgctaataccgcataatgactccggtccaaagatttatcgcccaaggattagcccgcgttagattagctagttggtgaggtaatggctcaccaaggcgacgatctatagggggtctgagaggatgatcccccacactgggactgagacacggcccagactcctacgggaggcagcagtgaggaatattggacaatggaggaaactctgatccagccatgccgcgtgtatgaagaaggccttagggttgtaaagtactttcaaacgtgaagataatgacggtagcgttagaagaagctccggctaaattcgtgccagcagccgcggtaat

SEQ ID NO: 4839 - DNA, 488 bp, Unknown
  Ascusbbf_1445312, encodes 16S rRNA
agagtttgatcatggctcagaacgaacgctggcggcaggcttaacacatgcaagttgagcgggattaattgatagcttgctattaattatgagagcagcgcactggtgagtaacacgtgggaacataccttttggtgggggacaacagttggaaacgactgctaataccgcataagccctaatggggaaaggttaattgccgaacgattgacccgcggaagattaggtagtaggtgtggtaacgtcctacctagccgacgatctctagctggtctgagaggacaagcagccacatttgaactgcgacacggtccaggatcctacgggaggcagcagggaggaatattgggcaatggaggaaactctgacccagccatgccgcgtgagtgaagaaggttttcggattgtaaagctctttcagacgggaagatgatgacggtaccgtcagaagaagcaccggctaactccgtgccagcagccgcggtaat

SEQ ID NO: 4840 - DNA, 490 bp, Unknown
  Ascusbbf_1104086, encodes 16S rRNA
agagtttgatcctggctcagggtgaacgctagctacaggcttaacacatgcaagtcgaggggtaacgacagcgaaagcttgcttttgctgggcgacgaccggcgcacgggtgagtaacgcgtatccaacctgcccataactaagggataatccgtagaaatgcggtctaataccttatgtgttccgacgaggacatctgaattggaataaagatttatcggttatggatggggatgcgtctgattagattgttggcggggcaacggcccaccaaggcgatgatggatagccgggttgagagaccgaccggccagattgggactgagacacggcccagactcctacgggaggcagcagtggggaatcttgcacaatgggcgaaagcctgatgcagcgacgccgcgtgcgggaaggaggccctcgggtcgtaaagctctgttgtcggggacgaatgttgaggcctagaacataggtttcaaatgacggtacc

SEQ ID NO: 4841 - DNA, 479 bp, Unknown
  Ascusbbf_1334658, encodes 16S rRNA
agagtttgatcctggctcaggatgaacgctggcggcgtgcctaatacatgcaagtcgagcggtaaggccacttcggtggtacacgagcggcggacggctgagtaacacgtaggaacgtaccccaaactgagggataactgctcgaaagagtagctaataccgcatgtgatcttcggattaaagctacggcggtttgggaacggcctgcgcatgattagcttgttggtgaggtaatggctcaccaaggcgacaatcattagctggtctgagaggatgatcagccagactgagactgagaacggcccagactcctacgggaggcagcagtagggaattttccacaatgggcgaaagcctgatggagcaacgccgcgtgcaggatgaaggccttcgggttgtaaactgcttttatatgtgacgattatgacggtagcatatgaataaggatcggctaactccgtgccagcagccgcggtaat

SEQ ID NO: 4842 - DNA, 490 bp, Unknown
  Ascusbbf_1777811, encodes 16S rRNA
agagtttgatcatggctcaggatgaacgctagcggcaggcttaacacatgcaagtcgaggggcagcggggctgagtgcttgcactcggccgccggcgaccggcgcacgggtgagtagcacgtatgcaacctgccccggagcgggggataacccggcgaaagccggactaataccgcgtacatatctgaaaggcatctttcagataggaaaggacctcggtccgctccgggatgggcatgcggcgcattaggcagacggcggggtaacggcccaccgtaccgacgatgcgtaggggttctgagaggaaggccccccacactggtactgagacacggaccagactcctacgggaggcagcagtgaggaatattggtcaatgggcggaagcctgaaccagccatgccgcgtgcaggaatgaggccctacgggtcgtgaactgcttttcgcgcggagcaataaggggggttcgcccccccgatgagagtacgcg

SEQ ID NO: 4843 - DNA, 490 bp, Unknown
  Ascusbbf_1043569, encodes 16S rRNA
agagtttgatcatggctcaggacgaacgctggcggcgtgcttaacacatgcaagtcgaacgagacgatttagaagcttgcttttaaagagtcgagtggcaaacgggtgagtaacgcgtagacaacctgccgcaaagatggggacaacagtccgaaaggactgctaataccgaatgttgtatcttttccgcatggaaggggtattaaagatggcctctacttgtaagctatcgcctgaagaggggtttgcgtctgattaggcagttggtgaggtaacggcccaccaaacctacgatcagtagccggtctgagaggatggacggccatactggaactgagacacggcccagactcctacgggaggcagcagtggggaatcttccgcaatgggcgaaagcctgacggagcaacgccgcgtgaaggatgaaggttttcggattgtaaacttcttttattaaggacgaataatgacggtacttaatgaataagct

SEQ ID NO: 4844 - DNA, 490 bp, Unknown
  Ascusbbf_1561127, encodes 16S rRNA
agagtttgatcctggctcaggataaacgctggcggcgtgcataacacatgcaagtcgaacgatgaaacttagatgatttcttcggaatgaacttaagtggattagtggcgaacgggtgagtaacacgtgagtaacctgccttacacaaggggatagcctctggaaacggagaataataccctataaagtctaatcagcacatgctggaaagaccaaagatttatcggtgtaagatggacttgcgtctgattagctagttggtgagataaaagctcaccaaggcgacgatcagtagccggctggagagagtgtacggccacattgggactgagacacggcccaaactcctacgggaggcagcagtggggaattttgcacaatgggggaaaccctgatgcagcgacgccgcgtgatttagaaggccttcgggttgtaaaaatcttttttacgggatgaaaatgacagtaccgtaagaataaggtccggctaa

SEQ ID NO: 4845 - DNA, 187 bp, Unknown
  Ascusbbf_494984, encodes 16S rRNA
agagtttgatcatggctcagatgatcagcccgcaatacgccacggcggattcctgcggttgtcgccggcccggtacagacagatctggttgccggatgggtccgtgaggcgagcctcccgccagagccagcgctgatcgatcgggtgctgcgtgaattcgattccggccgccagcagccgcggtaat

SEQ ID NO: 4846 - DNA, 490 bp, Unknown
  Ascusbbf_1522995, encodes 16S rRNA
agatttgatcctggctcaggatgaacgctagctacaggcttaacacatgcaagtcgaggggcagcaggacgatagcttgctattgttgctggcgaccggcgcacgggtgagtaacgcgtatccaaccttccccttagttgggcatagcccggcgaaagtcggattaataccctatgttcttcgtagaggacttctgaaatgaagcaaagatttatcgctaagggatggggatgcgtctgattaggtagtaggcggggtaacggcccacctagcctacgatcagtaggggttctgagaggaaggtctcccacattggtactgagacacggaccaaactcctacgggaggcagcagtgaggaatattggtcaatgggcgtaagcctgaaccagccaagtagcgtgcaggatgacggccctatgggttgtaaactgcttttgtcggggagcaataagggttacgtgtagcccgatgagagtacctggcgaata

SEQ ID NO: 4847 - DNA, 490 bp, Unknown
  Ascusbbf_1093929, encodes 16S rRNA
agagtttgatcatggctcaggacgaacgctggcggcgtgcttaacacatgcaagtcgaacgagaatctgtggatcgaggattcgtccaagtgaagcagaggacagtggcggacgggtgagtaacgcgtgagcgacctaccttagacagggggacaacagttggaaacgactgctaataccgcataagaccacgatgtcgcatggcattgaggtaaaaggagcaatccggtttaagatgggctcgcgtctgattagctggttggtggggtaacggcctaccaaggcgacgatcagtagccgacctgagagggtgatcggccacactggaactgagacacggtccagactcctacgggaggcagcagtggggaatattgggcaatgggcgaaagcctgacccagcaacgccgcgtgaaggaagaaggtcttcggattgtaaacatctgtcctgtgggacgaacaaatgacggtaccacaggaggaagccccg

SEQ ID NO: 4848 - DNA, 490 bp, Unknown
  Ascusbbf_620130, encodes 16S rRNA
agagtttgatcatggctcaggatgaacgctagctacaggcttaacacatgcaagtcgaggggcagcattatcgaagcttgctttgatagatggcgaccggcgcacgggtgagtaacgcgtatccaaccttccccatagtagggcatagcccgtagaaatgcggattaataccctatgtattccgaggatgacatctgattcggaacaaaggttcaccgctatgggatggggatgcgtctgattaggtagtaggcggggtaacggcccaccaaagcgacgatcagtagccggcctgagagggcggacggccacattgggactgagacacggcccaaactcctacgggaggcagcagtggggaatattgcacaatgggggaaaccctgatgcagccatgccgcgtgtgtgaagaaggccttcgggttgtaaagcacttttgcattcgaggaagacagcgcgtaaataaacgcgttatttgacgttagagtgt

SEQ ID NO: 4849 - DNA, 490 bp, Unknown
  Ascusbbf_1503029, encodes 16S rRNA
agagtttgatcctggctcaggatgaacgctggcggcgtgcctaacacatgcaagtcgaacggtcctcgcaagaggacagtggcgcacgggtgaggaacacgtagctgacctgcctcagagtgcgggataacgccccgaaaggggtgctaataccgcgtaagctcacgggttttagagacctgggagaaaaggccttcgggtcgctttgagagggggctgcggcgcatcaggtagttggtggggtaacggcctaccaagccaacgacgcgtagggggtctgagaggatgatcccccacactgggactgagacacggcccagactcctacgggaggcagcagtgagggatattgcacaatgggggaaaccctgatgcagcgacgccgcgtgggcgatgaaggtcttcggatcgtaaagccctttttgaggtgacgagcaaggacggtagcctcagaataagtctcggctaactacgtgccagcagccgcggt

SEQ ID NO: 4850 - DNA, 490 bp, Unknown
  Ascusbbf_1426121, encodes 16S rRNA
agagtttgatcctggctcaggatgaacgctagcggcaggcttaacacatgcaagtcgaggggcagcgggatgtagcaatacattgccggcgaccggcgcaagggtgcgtaacgcgtgagtaacatgcccgtatcaggaggataacccggagaaatccggactaatactgcataatattgtttagaggcatctttggacaattaaagtttcgacggatacggattggctcgcgtgacattagctagatggtaaggtaacggcttaccatggcgacgatgtctaggggttctgagaggaaggtcccccacactggaactgagacacggtccaaactcctacgggaggcagcagtgaggaatattggtcaatggtcgagagactgaaccagccaagtagcgtgaaggaagactgccctatgggttgtaaacttcttttgtttgggaataaagtgggccacgtgtggccttttgtatgtaccatacgaataagc

SEQ ID NO: 4851 - DNA, 490 bp, Unknown
  Ascusbbf_1636529, encodes 16S rRNA
ctcttttgctcctttctccttcttccctctctctccctgcttcccccatgcaagtcgaggggcatcatgagattagcttgctaatcttgatggcgaccggcgcacgggtgagtaacgcgtatccaaccttccctatactagaggatagcccggcgaaagtcggattaatactctatgttcttcgtagatgacatctgaaatgaagcaaagatttatcggtataggatggggatgcgtctgattagatagtaggcggggtaacggcccacctagtcgacgatcagtaggggttctgagaggaaggtcccccacattggaactgagacacggtccaaactcctacgggaggcagcagtgaggaatattggtcaatgggggaaaccctgacgcagcaacgccgcgtgcgggatgaaggccttcgggttgtaaaccgctttcagtagggaagaaagtgacggtacctacagaagaagctccggctaactacgtg

SEQ ID NO: 4852 - DNA, 490 bp, Unknown
  Ascusbbf_665583, encodes 16S rRNA
agagtttgatcctggctcaggacgaacgctggcggcatgcctaacacatgcaagtcgaacggagattatttcggtaatcttagtggcggacgggtgagtaacgcgtgggtaacctgcctcacacagggggataacagttagaaatgactgctaataccgcataacccgataggatcgcatgatccagacggaaaagatttatcggtgtgagatggacccgcgtctgattagcttgctggcggggtaacggcccaccagggcgacgatcagtaggggttctgagaggaaggtcccccacattggaactgagacacggtccaaactcctacgggaggcagcagtgaggaatattggtcaatggacgagagtctgaaccagccaagtagcgtgcaggaagacggccctatgggttgtaaactgcttttataggggaataaagtgagccacgtgtggttttttgcatgtaccctatgaataaggaccggctaat

SEQ ID NO: 4853 - DNA, 490 bp, Unknown
  Ascusbbf_1787803, encodes 16S rRNA
agagtttgatcctggctcaggatgaacgctagcggcaggcctaatacatgcaagctgaacggtaaatattgtagcaatacgatatgagagtagcgtaagggtgcgtaacacgtatgcaatctgccctgtacaggaggatagctcggggaaactcggattaatactccgtaagatattggtggggcatctcacagatattaaagtcttcggatggtacaggatgagcatgcgtctgattagctagttggtggtgtaacggaccaccaaggcgatgatcagtaggggaactgagaggttgatcccccacactggcactgagatacgggccagactcctacgggaggcagcagtagggaatattggtcaatgggtgagagcctgaaccagccatgccgcgtgcaggaagacggccttctgggttgtaaactgcttttactgggggataaaattctcttgcgagggaaattgaaggtacccggtgaataagcca

SEQ ID NO: 4854 - DNA, 484 bp, Unknown
  Ascusbbf_1426239, encodes 16S rRNA
agagtttgatcatggctcagaacgaacgctggcggcacgcttaacacatgcaagtcgaacgatgtaatggggcttgctccattacatagtggcggacgggtgagtaacacgtggagacctgactagaggaggtggatagctccgggaaactggaggtaatacagcataagctcgagagaggaaaggggaaacccacctttagagggatctgcggctgattaggtagttggtggggtaaaggcctaccaagccgacgatcagtagctggtctgagaggatgatcagccacactggaactgagatacggtccagactcctacgggaggcagcagtggggaatattggacaatggggggaaccctgatccagcgatgccgcgtgagtgaagaaggccttagggttgtaaagctctgtcctcaaggaagataatgacggtacttgaggaggaagccccggctaattacgtgccagcagccgcggtaat

SEQ ID NO: 4855 - DNA, 490 bp, Unknown
  Ascusbbf_1783810, encodes 16S rRNA
agagtttgatcctggctcaggatgaacgctggcggcgtgcctaatacatgcaagtcgaacggagattaagtagcttgctatttaatcttagtggcgcacgggtgagtaatgtatagttaatctgccctacactggaggacaacagttagaaatgactgctaatactccatactccttcttaacacaagttaagtcgggaaagtttttcggtgtaggatgagactatattgtatcagctagttggtgaggtaatggctcaccaaggctatgacgcataactggtctgagaggatgatcagtcacactggaactgagacacggtccagactcctacgggaggcagcagtagggaatgttgctcaatgggggaaaccctgaagcagcaacgccgcgtggaggatgacacttttcggagcgtaaactccttttgtcagggaagaaccatgacggtacctgacgaataagcaccggctaactccgtgccagcagc

SEQ ID NO: 4856 - DNA, 450 bp, Unknown
  Ascusbbf_1133734, encodes 16S rRNA
agagtttgatcctggctcaggatgaacgctagctacaggcttaacacatgcaagtcgaggggcagcatatcgaaagcttgcttttgatgatggcgaccggcgcacgggtgagtaacgcgtatccaaccttccctatactagaggatagcccggcgaaagtcggattaatactctatgttcttcgtagaagacatctgaaatgaagcaaaggtttaccggtataggatggggatgcgtctgattaggttgttggcggggtaacggcccaccaagcccacgatcagtaggggttctgagaggaaggtcccccacattggaactgagacacggtccaaactcctacgggaggcagcagtgaggaatattggtcaatggacgagagtctgaaccagccttgtaggtactgtatgaataaggaccggctaattccgtgccagcagccgcggtaat

SEQ ID NO: 4857 - DNA, 490 bp, Unknown
  Ascusbbf_1378773, encodes 16S rRNA
agagtttgatcctggctcaggatgaacgctagcggcaggcttaacacatgcaagtcgaggggtaacgcggggtagcactactctggcgacgaccggcgcacgagtgcgtaacgcgtatgcaacctacctgtaacaggggtataacggagagaaatttccactaatcccccatattgttagagattcgcatgtttctctaacgaaagcttcggtggttacggatgggcatgcgtgacattagctagttggtaaggtaacggcttaccaaggcgacgatgtctaggggagctgagaggcttatccccaacacaggtactgggacacggaccagactcatacgggaggcagcaggggggaatatgggtaaatggacggaagtcgaaacaagccaggccgggtggaggaagaaggtcctatgggtggtaaacgccttttgttcgagagtaagaagaggctggcgagcctcgatgagagtatcggacgaataagc

SEQ ID NO: 4858 - DNA, 490 bp, Unknown
  Ascusbbf_1378761, encodes 16S rRNA
agagtttgatcatggctcaggatgaacgctagctacaggcttaacacatgcaagtcgaggggtaacgacagcgaaagcttgcttttgctgggcgacgaccggcgaatgggtgagtaacgcgtatccaacctgccgcaaagtagggcacagtcttgcgaaagtaagattaatgccctatgtgctgtgatcaggacatctgaattgcagtaaaggttcaccgctttgcgatggggatgcgtctgattaggttgttggcggggtaacggcccaccaagcccgcgatacgtaggggttctgagaggacaagctgcccaattggaactgagagccggtccaaaatcctgcgggaggcaggagtgaggaatattggacaaggggcggacgtcggaaaaagccatgccgcgtggaggaagaaggtcctatgggttgtaaactccttttgttcgagagtaataagggctttgcgaagcccgatgagagtatcggacga

SEQ ID NO: 4859 - DNA, 203 bp, Unknown
  Ascusbbf_1413454, encodes 16S rRNA
agagtttgatcctggctcagatttcacggcggataacgtggtagtaatgaatggtgctaaaatgacgctgtacgctctgggacaagcactgtttgatgaaggcgacgaggttttgattcctttgccatactgggtaacctatggcgaacaggttaagctggccggtgccaagccagtcttcgtcaagccagcagccgcggtat

SEQ ID NO: 4860 - DNA, 490 bp, Unknown
  Ascusbbf_776828, encodes 16S rRNA
agagtttgatcctggctcaggacgaacgctggcggcgtgcttaacacatgcaagtcgagcgaggacggcaccttcgggtgtcgagccgagcggcggacgggtgaggaacacgtaagcgatctatcctcgtgcgggggacaacccggggaaacccggactgataccgcatgggccgacagcccgcatgggcggtcggggaaaggcggcctctgcttatgcaagctgtcgcgcggggaggagcttgcggcctatcagctagttggtgaggtaacggctcaccaaggcggtgacgggtagcgggtctgagaggacggcccgccacattgggactgagacacggcccagactcctacgggaggcagcagtgaggaatattggtcaatgggcggaagcctgaaccagccatgccgcgtgcaggaatgaggccctacgggtcgtgaactgcttttcgcgcggagcaataaggggggttcgcccctccgatgagagt

SEQ ID NO: 4861 - DNA, 490 bp, Unknown
  Ascusbbf_1122313, encodes 16S rRNA
aaagtttgatcatggctcagaacgaacgcttgcggcatgcttaaaacatgcaagtcgaacgagaaagggacttcggtcctgagtacagtggcgcacgggtgagtaacacgtaactaacgtcccttatcgctggggataactccgggaaaccggagctaataccgaatgatctaagagagtctctgggctttcttggtaaagcttccgggcgcgatgagatcgggttgcggcccattagcttgttggtggggtaatggcctaccaaggctacgatgggtagctggtctgagaggatgatcagccacactggaactgaaacacggtccagactcccacgggaggcagcagttgggaatattggacaatgggggaaaccctgatccagcaatgccgcgtgaatgatgaaggccctcgggtcgtaaagttcttttagcagggaagaagggaaacttgaccgtacctgcagaaaaagcaccggctaactccgtgc

SEQ ID NO: 4862 - DNA, 490 bp, Unknown
  Ascusbbf_1070647, encodes 16S rRNA
agagtttgatcctggctcaggatgaacgctagcgataggcttaacacatgcaagtcgaggggcagcaaggggtagcaatactctgttggcgaccggcggatgggtgagtaacacgtatgcaacctgccctctactcagggatagcccgttgaaagacggattaatacttgatattattaattatccgcatggattattaatgaaagatttattggtagaggatgggcatgcgtttcattagcttgttggtgaggtaacggctcaccaaggcaacgatgaataggggaactgagaggtttatcccccacactggaactgagacacggaccagactcctacgggaggcagcagtgaggaatattggtcaatggacgcaagtctgaaccagccaagtcgcgtgatggatgactgccttatgggttgtaaacatcttttatatgggaataaagtgctctacgtgtagggttttgcaagtaccatatgaataagc

SEQ ID NO: 4863 - DNA, 490 bp, Unknown
  Ascusbbf_1010027, encodes 16S rRNA
agagtttgatcctggctcagagtgaacgctggcggcaggcctaacacatgcaagtcgaacggcagcgcggggagcttgctccttggcggcgagtggcggacgggtgaggaatacatcggaatctgcctatttgtgggggataacctcgggaaaccgggactaataccgcatacgacctacgggtgaaagcggaggaccttcgggcttcgcgcagatagatgagccgatgtcggattagatagttggtgaggtaatggctcaccaagtcgacgatccgtagctggtctgaggggatgaccagccagactggaactgagacacggtccagactcctacgggaggcagcagtgaggaatcttccacaatgggcgaaagcctgacggagcaacgccgcgtgagtgatgacggccttcgggttgtaaagctctgtgatcggggacgaacggtccgtaagctaataccttatggaagtgacggtacccgaatagca

SEQ ID NO: 4864 - DNA, 490 bp, Unknown
  Ascusbbf_1767632, encodes 16S rRNA
agagtttgatcctggctcaggacgaacgctggcggcgtgcttaacacatgcaagtcgaacggaaaggcctcttcgggggtactcgagtggcgaacgggtgagtaacacgtgggtaacctgcccctggctttgtgataactccgggaaaccggggctaataccggatggtgactgtctgccgcatggtgggtggttgaaagtttttcggctggggatgggcccgcggcctatcagcttgttggtggggtgatggcctaccaaggcggtgacgggtagccggcccgagagggtgaccggccacactgggactgagacacggcccagactcctacgggaggcagcagtggggaatattgcgcaatgggcggaagcctgacgcagcgacgccgcgtgagggatgacggccttcgggttgtaaacctctttcagctctgacgaagctttcgggtgacggtaggagcagaagaagcaccggccaactacgtgccag

SEQ ID NO: 4865 - DNA, 470 bp, Unknown
  Ascusbbf_1640995, encodes 16S rRNA
agagtttgatcctggctcagaacgaacgctggcggcaggcctaacacatgcaagtcgaacgccctagcaatagggagtggcgcacgggtgagtaacgcgtgggaatgtacccttgggtgcggaacaacatcgggaaactgatgctaataccgcataatatctacggatcaaagatttatcgcccaaggatcagcccgcgtaagattaggtagttggtggggtaacggctcaccaagccgacgatctttagctggtcttagaggatgatcagccacactgagactgagacacggcccagactcctacggggggcagcagtgaggaatcttggacaatgggggaaaccctgatccagccatgccgcgtgagtgatgaaggccttcgggttgtaaagctctttcagatgtgaagataatgacggtagcatcagaagaagctccggctaactccgtgccagcagccgcggtaat

SEQ ID NO: 4866 - DNA, 490 bp, Unknown
  Ascusbbf_1532648, encodes 16S rRNA
agagtttgatcctggctcaggatgaacgctggcggcaggcttaatacatgcaagttgaacggtaacagatttggtagcaatactagatgctgacgagtggcgtacgggtgcgtaacacgtgtgtaacctaccttatacaggaacaaaacatcgagaaattggtgctaatattccataatattatgtataggcatctatatataattaaagctacggtggtataagatgggcacgcggtccattagctagttggtatggtaacggcataccaaggcgacgatggataggggttctgagaggaaagtcccccacattggaactgagacacggtccaaactcctacgggaggcagcagtgaggaatattggtcaatggccgagaggctgaaccagccaagtagcgtgcaggacgactgccttacaggttgtaaactgcttttatgcaagagtaaagtgagctacgtgtagtttattgcaagtattgcatgaat

SEQ ID NO: 4867 - DNA, 490 bp, Unknown
  Ascusbbf_1092362, encodes 16S rRNA
agagtttgatcatggctcaggatgaacgctagcgggaggcctaacacatgcaagccgagcggtatagttctttcgggaactagagagcggcgtacgggtgcggaacacgtgtgcaacctgcccttatcaaggggatagcccggagaaattcggattaataccctataatatatggtgaggcatctcactatattaaaaactgaggtggataaggatgggcacgcgcaagattagctagttggtgaggtaacggctcaccaaggcgacgatctttagggggcctgagagggtgatcccccacactgggactgagacacggcccagactcctacggggggcagcagtgaggaatattggacaatgggtggaagcctgatccagccatcccgcgtgaaggatgaaggttctatggattgtaaacttcttttgtatagggataaacctactctcgtgagggtagctgaaggtactatacgaataagcaccggct

SEQ ID NO: 4868 - DNA, 490 bp, Unknown
  Ascusbbf_1471084, encodes 16S rRNA
agagtttgatcctggctcagattgaacgctggcggcatgcttaacacatgcaagtcgaacggcagcatgacctagcttgctaggttgatggcgagtggcgaacgggtgagtaacgcgtaggaatatgccttaaagagggggacaacttggggaaactcaagctaataccgcataatttcttaggaaaaaagctggggatcgtaagacctggcgctttaagattagcctgcgtccgattagctagttggtagggtaaaggcctaccaaggcgacgatcggtagctggtctgagaggatgaccagccacactggaactgagacacggtccagactcctacgggaggcagcagtggggaatattggacaatgggggcaaccctgatccagcaatgccgcgtgtgtgaagaaggcctgagggttgtgaagcactttcagtggggaggaggattttctggttaagagctggagaattggacgttacctacagagg

SEQ ID NO: 4869 - DNA, 490 bp, Unknown
  Ascusbbf_1420068, encodes 16S rRNA
agagtttgatcctggctcagagcgaacgctggcggcgtgcctaacacatgcaggtcgaacgtgaacggcttcggcctagtaaagtggcgtacgggtgagtaacacgtggataatctaccctagagtctggaataacctgccgaaaggcgggctaatactggatagagcgacgaaatctgtaattgggtttttcgggaaagggagctcgctagagccctcgctttaggatgagtctgcgtcccattaggtagttggtggggtaatggcctaccaagcctgtgatgggtagctggtctgagaggatgatcagtcacactggaactgagacacggtccagacacctacgggaggcagcagtggggaatattggacaatgggcgaaagcctgatccagccatgccgcgtgtgtgaagaaggtcttcggattgtaaagcactttaagttgggaggaagggttgtagattaatactctgcaattttgacgttacca

SEQ ID NO: 4870 - DNA, 490 bp, Unknown
  Ascusbbf_1151552, encodes 16S rRNA
agagtttgatcatggctcaggataaacgctggcggcgtgcctaatgcatgcaagtcgcacgggagccctttcgggggtcgaccgtggcggacgggtgaggaacacgtggctaacctgcccaacagtgggggataacctcgggaaaccgaggctaataccgcatacgcttagtttcgggaacggagctaaggaaaggagtaatccgctgatggagggggctgcggccgattagctagttggtggggtaagagcctaccaaggcggtgatcggtagctggtctgagaggacgatcagccacacggggactgagacacggccccgactcctacgggaggcagcagcaaggaattttccacaatgggcgcaagcctgatggagcaacgccgcgtgggggatgacgcttttcggagtgtaaaccccttttcgagaggacgaagccaatgacggtactctcggaataaggaccggctaactacgtgccagcagccg

SEQ ID NO: 4871 - DNA, 490 bp, Unknown
  Ascusbbf_972528, encodes 16S rRNA
agagtttgatcctggctcaggacgaacgctggcggtgtgcttaacacatgcaagtggagcgacgaaccagggcttgccctggggcaaagccgcgaacgggtgagtaacacgtgggtaacctgccccgatgactgggacaacccgaggaaactcgggctaataccggatgtcctcatcactcacgagagtgatgagcaaagatagcttcggctttcgcattgggaggggcccgcggcccattagcttgttggtggggtaacggcctaccaaggcaacgatgggtagctggtctgagaggacgatcagccacactgggactgagacacggcccagactcctacgggaggcagcagtggggaatcttgcgcaatgcgcgaaagcgtgacgcagcaacaccgcgtgagggaagacggccttcgggttgtaaactgcttttgtatggggataaagtgctccacgtgtggagttttgtaggtaccatacgaataag

SEQ ID NO: 4872 - DNA, 466 bp, Unknown
  Ascusbbf_1418748, encodes 16S rRNA
agagtttgatcctggctcaggatgaacgctggcggcgtgcctaacacatgcaagtcgaacggtcaaaccgccctcgggcggagatagagtggcgaacgggtgagtaacacgtgaccaacctgccccgcgcaccgggacaaccccccgaaagggggattaataccggatactccggcggcgcgggatggggtcgcggcccatcaggtagacggccgggtagaggccggccgtgccgacgacgggtaaccgggttgagagaccgaccggccacattgggactgagatacggcccagactcctacgggaggcagcagtggggaatattgcgcaatgggggcaaccctgacgcagcaacgccgcgtgcgggacgaaggcactcgtgtcgtaaaccgctttcagcagggaagacatcgacggtacctgcagaagaagccccggctaactacgtgccagcagccgcggtaat

SEQ ID NO: 4873 - DNA, 490 bp, Unknown
  Ascusbbf_1487849, encodes 16S rRNA
agagtttgatcctggctcaggatgaacgttggcggcatgcctaacacatgcaagtcgaacgcgaggcttcggtctcgagtggcgaacgggtgcgtaacacgtaggtgacctgcccagcagtgggggataaccagcggaaacgctggctaataccgcatacgtgtacgagggtttgagactcgtacagaaagctcaatgtgctgctggaggggcctgcggcctatcaggtagttggtggggtaacggctcaccaagccgatgacgggtagctgacctgagagggtggtcagccacaggggaactgagagacggtccccactcctacgggaggcagcagtgagggatattggtcaatggccgagaggctgaaccagcaatgccgcgtgcgggaggacgcccttcggggtgtaaaccgcttttctgggggacgagacaaggacggtaccccaggaacaagttacggctaactacgtgccagcagccgcggtaa

SEQ ID NO: 4874 - DNA, 490 bp, Unknown
  Ascusbbf_1619739, encodes 16S rRNA
agagtttgatcctggctcaggatagacgctggcggcgcacataagacatgcaagtcgaacggacttaattcgttagtttactaatggaagcggttagtggcggactggtgagtaacgcgtaagcaacctgcctattagtagggaataacagtgagaaatcattgctaataccgtataagctggaaacatcgcatgatgtagtcagaaaaggagcaattcgctaatagatgagcctaagtcggattagctagttggtggggtaaaggcctaccaaggcgacgatctgtagcgggtctgagaggatgatccgccacactgggactgagacacggcccagactcctacgggaggcagcagtgaggaatattggacaatgggggaaactctgacgcagtgacgccgcgtgcaggaagaaggttttcggattgtaaactgctttagacagggacgaaacaaatgacggtacctgtagaataagctccggctaact

SEQ ID NO: 4875 - DNA, 490 bp, Unknown
  Ascusbbf_1766751, encodes 16S rRNA
agagtttgatcatggctcaggatgaacgctagcgggaggcttaatacatgcaagtcgtacggtaacatgtccttcgggatgatgacgagtggcggacgggtgagtaacgcgtacacgatctacctataagtctgggatagtcactggaaacggtgaataatatcggatgtggatatattgcttcatggtgatatatttaaaggctagactgcttatagatgagtgtgcgtcctattagttagttggagaggtaacggctccccaaggcgatgataggtagggggcgtgagagcgtggacccccacacgggtactgagacacggacccgactcctacgggaggcagcagtaaggaatattggacaatgggcgagagcctgatccagccatcccgcgtgcaggaagacagccctatgggttgtaaactgcttttataagggaagaacgtccccgattgatcggggtatgacggtaccttaggaataagcacc

SEQ ID NO: 4876 - DNA, 472 bp, Unknown
  Ascusbbf_1896136, encodes 16S rRNA
agagtttgatcatggctcagagcgaacgctggcggcaggcttaacacatgcaaatcgaacggccgtagcaatacggcagtggcagacgggtgagtaacacgtgggaatgtacccttcggttcggaataacccagggaaacttgggctaataccggatacgcccttacggggaaagatttattgccgaaggatcagcccgcgtccgattagctagttggtggggtaatggcccaccaaggcgacgatcggtagctggtctgagaggatgatcagccacactgggactgagacacggcccagactcctacgggaggcagcagtggggaatattggacaatgggcgcaagcctgatccagccatgccgcgtgggtgatgaaggccctagggttgtaaagccctttcggcggggaagataatgacggtacccgcagaagaagccccggctaacttcgtgccagcagccgcggtaat

SEQ ID NO: 4877 - DNA, 490 bp, Unknown
  Ascusbbf_1799989, encodes 16S rRNA
agagtttgatcctggctcaggatcaacgctggcggcgtgcctagtgcatgcaagtcgaacgggcttcccttcgggggagtcacgtggcggacgggtgaggaacacgtgggcgacctaccctggggcgggggatagccgcgagaaatcgtggataattccgcatacgctccctcccgtgttgtgggggggaggaaaggtgcgtttcggcgcgccacccttggcggggcctgcggccgattagttagttgggggggtaacggcctcccaaggcgatgatcggtagctggtctgagaggacggccagccaaacggggactgagacacggccccgactcctacgggaggcagcagcaaggaatcttccgcaatgggcgaaagcctgacggagcaacgccgcgtgcgggatgacgcccttcggggtgtaaaccgcttttacggggggataaagtgagtgatgtgtcattcattgcaggtaccccgcgaataagga

SEQ ID NO: 4878 - DNA, 490 bp, Unknown
  Ascusbbf_795219, encodes 16S rRNA
agagtttgatcctggctcaggatgaacgctagctacaggcttaacacatgcaagtcgaggggcagcatgcaggaagcttgcttcttgtgatggcgaccggcgcacgggtgcgtaacgcgtatccaatctaccctatactcggggacagccctgcgaaagtaggattaatacccgatgttcttatgatgccgcatgacattataagcaaagatttattggtataggatgaggatgcgtcccattaggcagtaggcggggtaacggcccacctaaccgacgatgggtaggggttctgagaggaaggtcccccacattggaactgagacacggtccaaactcctacgggaggcagcagtgaggaatattggtcaatgggcgagagcctgaaccagccaagtagcgtgcaggaagacggccctatgggttgtaaactgcttttataggggaataaagtgagccacgtgtggttttttgcatgtaccctatgaat

SEQ ID NO: 4879 - DNA, 485 bp, Unknown
  Ascusbbf_1198901, encodes 16S rRNA
agagtttgatcctggctcagaacgaacgctggcggcatgcctaacacatgcaagtcgaacgggatcttcggatctagtggcggacgggtgagtaacgcgtgggaacctgcccttgggtacggaataacagttggaaacgactgctaataccgtatacgtccccctttggttgacattgggggagaaagatttatcgcccttggaggggcccgcgtgagattaggtagttggtggggtaatggcctaccaagccgacgatctctagctggtttgagaagatgatcagccacactgggactgagacacggcccagactcctacgggaggcagcagtggggaatattggacaatgggggcaaccctgatccagcaatgccgcgtgagtgaagaaggccttagggttgtaaagctcttttacccgggaagataatgacggtaccgggagaataagccccggctaactccgtgccagcagccgcggtaat

SEQ ID NO: 4880 - DNA, 490 bp, Unknown
  Ascusbbf_1200639, encodes 16S rRNA
agagtttgatcatggctcaggacgaacgctggcggcgcgcctaacacatgcaagtcgaacggagaaaggaaagcttgcttttctttcttagtggcggacgggtgagtaacacgtgagcaacctgccttacagagggggataacgttctgaaaagaacgctaataccgcataacacagttttggggcatcctggaattgtcaaaggagcaatccgctgtaagatgggctcgcgtccgattaggcagttggcggggtaacggcccaccaaaccgacgatcggtagccggactgagaggttgaacggccacattgggactgagacacggcccagactcctacgggaggcagcagtgggggatattgcacaatgggggaaaccctgatgcagcgacgccgcgtgagggaagaaggttttcggattgtaaacctctgtcttcggtgacgaaaatgacggtaaccgaggaggaagccacggctaactacgtgccag

SEQ ID NO: 4881 - DNA, 490 bp, Unknown
  Ascusbbf_775784, encodes 16S rRNA
agagtttgatcatggctcaggatgaacgctgacagaatgcttaacacatgcaagtcgatggggaagtggtacttgtcactatgggaaccatggcggacgggtgagtaacgcgtaaaggacttaccttttagactgggataacagtcggaaacgactgataagactggatataattaaggattcgcatgaatttttaatgaaaagaggagctaaaagagagctttgcgtcctattagctagttggtgaggtagaggctcaccaaggcgatgataggtagccggcctgagagggtgaacggccacaaggggactgagatacggcccttactcttacgggaggcagcagtggggaatattggacaatggagggaactctgatccagcaattctgtgtgcacgaagacggttttcggattgtaaagtgctttcagtagggaagaagtaagtgacggtacctacagaagaagcgacggctaaatacgtgccagca

SEQ ID NO: 4882 - DNA, 470 bp, Unknown
  Ascusbbf_1118643, encodes 16S rRNA
agagtttgatcctggctcagaacgaacgctggcggcaggcttaacacatgcaagtcgagcgctgtagcaatacagagcggcagacgggtgagtaacgcgtggggatgtacccagaggtacggaacaacttcgggaaactggagctaataccgtatgtgaccgtgaggtgaaagatttatcgcctttggatcaacccgcgtcagattagctagttggtagggtaatggcctaccaaggcgacgatctgtagctggtctgagaggatgatcagccacattgggactgagacacggcccaaactcctacgggaggcagcagtggggaatattggacaatgggcgcaagcctgatccagccatgccgcgtgagtgatgacggccttagggttgtaaagctctttcgctcgcgacgataatgacggtagcgagagaagaagccccggctaacttcgtgccagcagccgcggtaat

SEQ ID NO: 4883 - DNA, 490 bp, Unknown
  Ascusbbf_765065, encodes 16S rRNA
agagtttgatcatggctcaggatcaacgctggcggcgtgcctaatgcatgcaagtcgaacggagccgccttcgggcggtcacgtggcggacgggtgaggaacacgtgggcgatctgccccgaggcgggggatagctaccagaaatggtaggtaataccgcatgagcttcccgggttacggccggggaaggaaagtcgcgagacgccttgggaggagcctgcggcggattagctggttggtggggtaacggcctaccaaggcgatgatccgtagctggtctgagaggatggccagccacaggggaactgagacacggtccccactcctacgggaggcagcagcaaggaattttccgcaatgggtgaaagcctgacggagcaacgccgcgtgggggatgacgcttttcggagtgtaaaccccttttctcagggatgaaaccaatgacagtacctgaggaataaggaccggctaactacgtgccagcagccgc

SEQ ID NO: 4884 - DNA, 490 bp, Unknown
  Ascusbbf_1851741, encodes 16S rRNA
agagtttgatcctggctcaggatgaacgctgacagaatgcttaacacatgcaagtcaatgagaagacttctcttcggagaagaggttatcatggcggacgggtgagtaacgcgtaaagaacttaccttatggtctgggataacagttggaaacgactgataacactggatactatgacagtttcgcatgaaactgttatgaaaagcaatgtcataagagagctttgcgtcctattagctagttggtgaggtaaaggctcaccaaggcgatgataggtagccggcctgagagggtgaccggccacaaggggactgagatacggcccttactcttacgggaggcagcagtggggaatattggacaatggaggcaactctgatccagcaattctgtgtgcacgaagaaggttttaggattgtaaagtgctttcagttgggaagaagcaagtgacggtaccaacagaagaagcgacggctaaatacgtgccagc

SEQ ID NO: 4885 - DNA, 490 bp, Unknown
  Ascusbbf_888701, encodes 16S rRNA
agagtttgatcctggctcaggacgaacgctggcggcgtgcctaacacatgcaagtcgaacggtaaggcccttcggggtacacgagtggcgaacgggtgagtaacacgtgagcaacctgcccttgacttcggaataagcactcgaaagggtgcctaataccggatatgaccctcaccgacatcggagagggttgaaagccctggcggtcaaggatgggctcgcggcctatcagctagttggtgaggtaacggctcaccaaggcgtcgacgggtagccggcctgagagggcgaccggccacactgggactgagatacggcccagactcctacgggaggcagcagtggggaatattgcacaatgggcgaaagcctgatgcagcaacgccgcgtgcgggatgacggccttcgggttgtaaaccgctttcagtagggacgaagcgaaagtgacggtacctacagaagaagcaccggccaactacgtgccagcagc

SEQ ID NO: 4886 - DNA, 472 bp, Unknown
  Ascusbbf_1851187, encodes 16S rRNA
agagtttgatcatggctcagaacgaacgctggcggcaggcttaacacatgcaagtcgaacgggtgtagcaatacatcagtggcagacgggtgagtaacacgtgggaaccttcctcgttgtacggaacaactcagggaaacttgagctaataccgtatacgtccgagaggagaaagatttatcgcaatgagacgggcccgcgtcggattagctagttggtagggtaacggcctaccaaggcaacgatccgtagctgatctgagaggaggatcagccacactgggactgagacacggcccagactcctacgggaggcagcagtggggaatcttggacaatgggcgcaagcctgatccagccatgccgcgtgagtgaagaaggccttagggttgtaaagctcttttgccagggacgataatgacggtacctggagaataagccccggcaaacttcgtgccagcagccgcggtaat

SEQ ID NO: 4887 - DNA, 490 bp, Unknown
  Ascusbbf_1209286, encodes 16S rRNA
agagtttgatcctggctcaggatgaacgctagcgacaggcttaacacatgcaagtcgaggggcagcatggcggtggcaacaccgccgatggcgaccggcgcactggtgagtaacacgtatgcaacctgccccctgccggggaataaaccagggaaacttggcctaatgccgcataacacatcgtccggcatcggacggtgttgaaagctccggcggcaggggatgggcatgcgccgcattagcttgtaggcggggtgacggcccacctaggcgacgatgcgtaggggttctgagaggaaggtcccccacactggtactgagacacggaccagactcctacgggaggcagcagtgaggaatattggtcaatgggcgagagcctgaaccagccaagtagcgtgcgggacgaaggccctatgggttgtaaaccgcttttacggggggataaagtgagtgacgtgtcattcattgcaggtaccccgcgaataag

SEQ ID NO: 4888 - DNA, 490 bp, Unknown
  Ascusbbf_1013522, encodes 16S rRNA
agagtttgatcctggctcaggacgaacgctggcggcatgcctaacacatgcaagtcgaacggaataggattggttgtagcgatacttttgatcctatttagtggcgaacgggtgagtaacacgtgagcaacctgccttttacacagggataacagccggaaacggctgctaataccggataagaccacaccgaggcatctcggaggggtcaaagcgcttagcggtaaaagatgggctcgcgtcccattagctagttggtgaggtaacggcccaccaagaccgcgatcggtagccggactgagaggttgaacggccacattgggactgagacacggcccagactcctacgggaggcagcagtggggaatattgcacaatgggggaaaccctgatgcagcgacgccgcgtgagtgaagaagtatttcggtatgtaaagctctatcagcaaggaagataatgacggtacttgactaagaagccccggctaact

SEQ ID NO: 4889 - DNA, 490 bp, Unknown
  Ascusbbf_1855665, encodes 16S rRNA
agagtttgatcctggctcagcctgaacgctggcggcgtggctaagacatgcaagtcgtacggacgtagcaatacgtcagtggcggacgggtgagtaatgtatcgctaatgtacccttcactctgggatagccgtgggaaactgcgggtaataccagatgacataaccgaatcgcatggtttggttctcaaaggagcaatacggtgagggagcaggcgatatcgtatcagcttgttggtgaggtaatggctcaccaaggcgacgacgcgtagctggtctgagaggacggccagccacattgggactgagacactgcccagactcctacggggggctgcagtaacgaatcttccgcaatgcacgcaagtgtgacggagcgacgccgcgtggaggttaagtccttcgggatgtaaactcctgtcaggggttaccaagatctgaggagccccagaggaaggcacggctaactctgtgccagcagccgcggtaat

SEQ ID NO: 4890 - DNA, 490 bp, Unknown
  Ascusbbf_896278, encodes 16S rRNA
agagttgatcatggctcaggatgaacgctagctacaggcttaacacatgcaagtcgaggggcagcatgaaatcagcttgctgactttgatggcgaccggcgcacgggtgcgtaacacgtatccaatctacccatggctcagggatagcctttcgaaagaaagattaatacctgatggtctgtgattgagacatctcgaacacagtaaagattaatcggcgatggatgaggatgcgtctgattagatagtaggcggggtaacggcccaccaagtcagcgatgggtagctggtgtgagagcacgaccagccacacgggcactgagacacgggcccgactcctacgggaggcagcagtgaggaatattggtcaatggacgcaagtctgaaccagccatgccgcgtggaggatgacagccttctgggttgtaaacttcttttatatgggaagaacagcatggtttctactatgtccgacggtaccatatgaata

SEQ ID NO: 4891 - DNA, 490 bp, Unknown
  Ascusbbf_872060, encodes 16S rRNA
agagtttgatcctggctcaggacgaacgctggcggcgtgcttaacacatgcaagtcgaacgaggtccacggtgtcgcaagacacctgaagacctagtggcgaacgggtgcgtaacacgtgagaaacttgtcccggtctctggaataacagttggaaacaactgctaataccggatgccgtcggaccatcgcatggtggactgacgaaagggttaccggatcgggagagtctcgcggcctatcagcttgttggtgaggtaatggctcaccaaggcatcgacgggtagctggtctgagaggatgatcagccacactgggactgagacacggcccagactcctacgggaggcagcagtggggaatcttgcacaatgggcgaaagcctgatgcagcaacgccgcgtgcgggaagaaggccctagggttgtaaagctctttcaccggtgaagataatgacggtaaccggagaagaagccccggctaacttcgtgc

SEQ ID NO: 4892 - DNA, 490 bp, Unknown
  Ascusbbf_964974, encodes 16S rRNA
agagtttgatcctggctcagattgaacgctggcggtatgcttaacacatgcaagtcgaacggcagcatgatgtgtagcaatacacattgacggcgagtggcggacgggtgagaaacgcgtaggaatctgccttatagagggggacaactagaggaaactctagctaataccgcataatgtctacggaccaaacgctggggcaacctggcgccataagaggagcctgcgtccgattagctagttggtggggtaaaggcctaccaaggcgatgatcggtagctggtctgagaggatgatcagccacactgggactgagacacggtccaaactcctacgggaggcagcagtgaggaatattggtcaatgggcgagagcctgaaccagccaagtagcgtgcaggaagacggccctatgggttgtaaactgattttgtatggggataaagtgctccacgtgtggagttttgtaggtaccatacgaataaggaccg

SEQ ID NO: 4893 - DNA, 490 bp, Unknown
  Ascusbbf_964588, encodes 16S rRNA
agagtttgatcctggctcaggatgaacgctagctacaggcttaacacatgcaagtcgagcgatcccttcggggatagcggcggacgggtgagtaacgcgtgggaacgtgcccttttcttcggaatagcccagggaaacttggattaataccggatacgcccttcgggggaaagatttatcggaaaaggatcggcccgcgttggattaggtagttggtggggtaatggcctaccaagccgacgatccatagctggtttgagaggatgatcagccacactgggactgagacacggcccagactcctacgggaggcagcagtgaggaatattggtcaatgggcgtgggcctgaaccagccaagtagcgtgcaggatgacggccctatgggttgtaaactgcttttgtatggggatagagtgctccacgtgtggggcattgcaggtaccatacgaataaggaccggctaattccgtgccagcagccgcggtaat

SEQ ID NO: 4894 - DNA, 490 bp, Unknown
  Ascusbbf_1725703, encodes 16S rRNA
agagtttgatcctggctcagaatgaacgttggcggcgtgcttaacacatgcaagtcgagcgagaaagttccttcgggaatgagtacagcggcggacgggtgtggaacgcgtgagaatctgccctttagtgaagaatacccttgagaaattgaggataatactgcatattcccttcgggggaaagatggctttatgctgtagctagaggatgagcttgcgtgctattagctagttggtgaggtaatggctcaccaaggcgatgatggctagccggcctgagagggtgtgcggccacattgggactgagatacggcccagactcctacgggaggcagcagtgaggaatattggtcaatgggcgagagcctgaaccagccaagtagcgtgcaggatgactgccctatgggttgtaaactgcttttatgcggggataaagtgacgtacgcgtacgtttttgcaggtaccgcatgaataaggaccggctaattcc

SEQ ID NO: 4895 - DNA, 490 bp, Unknown
  Ascusbbf_1222765, encodes 16S rRNA
agagtttgatcctggctcagattgaacgctggcggcaggcttaacacatgcaagtcgtacggtaacagagggaagcttgcttctctgctgacgagtggcggacgggtgagtaacacgtgagaaacctgccccaaagactgggatgagccttggaaacgaggtctaataccggataccttctcttcatctcctgatgataagaagaaatgctccggcgctttgggatggtctcgcgacctatcagcttgttggtgaggtaaaagctcaccaaggctacgacgggtagctggtctgagaggatgtccagccacactggaactgagatacggtccagactcctacgggaggcagcagtagggaatcttgcacaatgagggaaaccttgatgcagcgacgccgcgtgcgggacgaaggccctagggttgtaaaccgctttcagttgggacgaaagtgacggtaccaacagaagaagccccggccaactatgtgc

SEQ ID NO: 4896 - DNA, 490 bp, Unknown
  Ascusbbf_1244773, encodes 16S rRNA
agagtttgatcatggctcaggacgaacgctggcggcatgcctaacacatgcaagtcgaacggagaactccttcgggggttcttagtggcgaacgggtgagtaacgcgtaggcaacctgccctttggatggggacaacattccgaaaggagtgctaataccgaatgtgacgattttaccgcatggtttaatcgtgaaagatggcctctacatgtaagctatcgccaaaggatgggcctgcgtctgattagctagttggtggggtaacggctcaccaaggcgacgatcagtagccggtctgagaggatgatcagccacactgggactgagacacggcccagactcctacgggaggcagcagtggggaatattggacaatgggcgaaagcctgatccagcaatgccgcgtgtgtgaagaaggtcttcggattgtaaagcactttcgacggggacgatgatgacggtacccgtagaagaagccccggctaactt

SEQ ID NO: 4897 - DNA, 490 bp, Unknown
  Ascusbbf_769582, encodes 16S rRNA
agagtttgatcatggctcagaacgaacgctggcggcaggcctaacacatgcaagtcgagcgaacccttcgaggttagcggcggacgggtgagtaacgcgtgggaatatgcccttctctacggaatagtctcgggaaactgggggtaataccgtatacgccctttgggggaaagatttatcggagaaggattagcccgcgttggattaggtagttggtggggtaatggcctaccaagcctacgatccatagctggtttgagaggatgatcagccacactggaactgagacacggtccagactcctacgggaggcagcagtgaggaatattggtcaatgggcgagagcctgaaccagccaagtagcgtgcaggatgacggccctatgggttgtaaactgcttttatatgaggataaagttcgttacgtgtaacgttttgcaggtatcatatgaataaggaccggctaattccgtgccagcagccgcggtaat

SEQ ID NO: 4898 - DNA, 490 bp, Unknown
  Ascusbbf_847445, encodes 16S rRNA
agagtttgatcctggctcagattgaacgctggcggcaggcttaacacatgcaagtcgggcggtaacaggggagcttgctcccgctgacgagcggcggacgggtgagtaatgcatgggaatctgcccggtaatgggggatagcccggggaaacccggattaataccgcatacgccctacgggggaaagcaggggatcttcggaccttgcgttatcggatgagcccatgtcggattagctagttggtagggtaaaggcctaccaaggcgacgatccgtagctggtttgagaggatgatcagccacactgggactgagatacggcccagactcctacgggaggcagcagtcgggaatattgcgcaatggaggaaactctgacgcagtgacgccgcgtgcaggaagaaggttttcggattgtaaactgctttagacagggaagaacaaagacagtacctgtagaataagctccggctaactacgtgccagcagc

SEQ ID NO: 4899 - DNA, 153 bp, Unknown
  Ascusbbf_1604897, encodes 16S rRNA
agagtttgatcatggctcagaaggagtgcaatccggaactgttttttcagtttgcgcagaaagtccagtaagtgatcaatggcgtgaggctgtttatcaaaataataatgaaccgactactttagctctaggaatgccagcagccgcggtaat

SEQ ID NO: 4900 - DNA, 490 bp, Unknown
  Ascusbbf_1709310, encodes 16S rRNA
agagttgatcctggctcaggataaacgctggcggcgcacataagacatgcaagtcgaacggacttaattcgttagtttactaatggaagcggttagtggcggttgggtgagtaacgcgtatccaacctggccctatctcggggacagcccctcgaaagagggattaatacccgatgttccctggtttccgcatgtttaccagggcaaaggcatattgtcggatagggatggggatgcgttccattaggcagtcggcggggtaacggcccaccgagcctacgatggataggggttctgagaggaaggccccccacactgggactgagacacggcccagactcctacgggaggcagcagtgaggaatattggtcaatggcggcaacgctgaaccagccaagtagcgtgagggattactgccctatgggttttaaacctcttttgttggggagcaaccggcatcacttgtggtgccctgcgagtacccttcga

SEQ ID NO: 4901 - DNA, 490 bp, Unknown
  Ascusbbf_918578, encodes 16S rRNA
agagtttgatcatggctcaggatgaacgctagctacaggcttaacacatgcaagtcgaggggcagcgggaggaaagcttgctttccttgccggcgaccggcgcacgggtgcgtaacgcgtatcgaacctggcccatacacggggatagtctcctgaaagggaggttaatacccggcggtcccacttggtcgcatgactgtgtgggtgaagattcatcggtatgggatggcggtgcgtaggattagctagtcggcggggtaacggcccaccgagccatcgatcagtaggggttctgagaggaaggtcccccacattggtactgagacacggaccaaactcctacgggaggcagcagtgaggaatattggtcaatgggcgcgagcctgaaccagccaagtagcgtgagggaagactgccttatgggttgtaaacctcttttgttagggagcaaccggtggcactagtgccattctgcgagtacctttcgaat

SEQ ID NO: 4902 - DNA, 490 bp, Unknown
  Ascusbbf_816599, encodes 16S rRNA
agagtttgatcctggctcaggacgaacgctggcggcgtgcttcatacatgcaagtcgaacgagaaatttacttcggtaaatggaaagtggcggacgggtgagtaaaatgtagagaatctgccctagagagggggacaacagagggaaacttctgctaataccccatatgagcgtagctgagatgctattcttgaaaactccggtgctctgggatgagtctgcatctgattagctagttggtggggtaacggcctaccaaggcgacgatcagtagccggtctgagaggatgaacggccacattgggactgagacacggcccagactcctacgggaggcagcagtggggaatcttccgcaatgggcgaaagcctgacggagcaacgccgcgtgagtgaagaaggctttcgggttgtaaagctctgttatagaggacgaaggaagtgacggtactctataaggaagccccggctaactacgtgccagcagccg

SEQ ID NO: 4903 - DNA, 490 bp, Unknown
  Ascusbbf_846476, encodes 16S rRNA
agagtttgatcatgctcaggatgaacgctagctacaggcttaacacatgcaagtcgaggggcatcacgggtcttgcttgcaagacctggtggcgaccggcgcacgggtgagtaacgcgtatccaacctgcccccgggacgggcacagcccggtgaaaaccggattaatgcccgatagggtcacaatagggcatctgagtgtgaccaaaggccttttggcgcccgcggatggggatgcgtctgattaggtagtaggcggggcaacggcccacctagccgtcgatcagtaggggttctgagaggaaggtcccccacattggtactgagacacggaccaaactcctacgggaggcagcagtgaggaatattggtcaatgggcgcaagcctgaaccagccaagtagcgtgcaggatgactgccctatgggttgtaaactgcttttatacggggataaagtcagagtcgtgactctgtttgcaggtaccgtatga

SEQ ID NO: 4904 - DNA, 474 bp, Unknown
  Ascusbbf_1487790, encodes 16S rRNA
agagtttgatcctggctcaggatgaacgctggcggcgtgcttaatacatgcaagtcgagcggtaacacttcgggtgacgagcggcggacggctgagtaacacgtaggaacgtaccccaaactgagggataactgctcgaaagagtagctaataccacatgtgatcttcggattaaagcttcggcggtttgggaacggcctgcgcatgattagcttgttggtgaggtaacggctcaccaaggcaacgatcattagctggtctgagaggatgaccagccagactgggactgagacacggcccagactcctacgggaggcagcagtagggaattttccacaatggacgaaagtctgatggagcaacgccgcgtgcaggatgaaggctctagggtcgtaaactgcttttataggtgaagattatgacggtaacctatgaataaggatcggctaactccgtgccagcagccgcggtaat

SEQ ID NO: 4905 - DNA, 490 bp, Unknown
  Ascusbbf_1488771, encodes 16S rRNA
agagtttgatcatggctcaggacgaacgctggcggtgtgcctcatacatgcaagtcgaacgagaatcgagagcttgctctcgaggaaagtggcggacgggtgagtacaacataggaaatctgccctaaagcgggggacaacagagggaaactcctgctaataccccatatgagcttggttgaaataccaatcttgaaagatttatcactttaggatgagcctgtgcctgattagctagttggtggtgtaatggactaccaaggcgacgatcagtagctggtttgagaggatgatcagccacaatgggactgagacacggcccatactcctacgggaggcagcagtagggaattttgcgcaatgggggaaaccctgacgcagcaacaccgcgtgaatgttaagcccttcggggtgtaaagttctgtcagtagggaagaacaaatgactgtacctacaaaggaagcaccggctaactccgtgccagcagccg

SEQ ID NO: 4906 - DNA, 490 bp, Unknown
  Ascusbbf_1896162, encodes 16S rRNA
agagtttgatcctggctcaggatgaacgctagctacaggcttaacacatgcaagtcgaggggcagcatgacgatagcttgctattgtcgatggcgaccggcgcacgggtgagtaacgcgtatccaaccttcccgttgctaggggataaccttgcgaaagtaagactaataccctatgaggttcttcgcaggcatctaaagagaacgaaagatttatcggcaacggatggggatgcgtctgattagctagttggtgaggtaacggctcaccaaggcgacgatcagtagccgacctgagagggtgaacggccacattgggactgagacacggcccaaactcctacgggaggcagcagtgaggaatattggtcaatgggcgagagcctgaaccagccaagtagcgtgcgggacgaaggccctatgggttgtaaaccgcttttacggggggataaagtcgggaacgtgttcccgtttgtaggtactagatgaat

SEQ ID NO: 4907 - DNA, 175 bp, Unknown
  Ascusbbf_1582666, encodes 16S rRNA
agagtttgatcctggctcaggatgaacgctggcggcgtgcttaacacatgcaagtcgcaaaaagtgaaacattatccatcacctttgtatttacaccatagtttcctgccgtcatgcggtaatatgtgtttgaactgcttgttatctttgcagtctggccagcagccgcggtaat

SEQ ID NO: 4908 - DNA, 484 bp, Unknown
  Ascusbbf_1583665, encodes 16S rRNA
agagtttgatcctggctcagaacgaacgctggcggcaggcttaacacatgcaagtcgagcgcgcccttcgaggtgagcggcggacgggtgagtaacgcgtgggaacgtgcccctttcttcggaatagcctcgggaaactgggagtaatgccggatacgcccttttggagtgatccatttggggaaagatttatcggagagggatcggcccgcgttggattaggtagttggtggggtaatggcctaccaagccgacgatccatagctggtttgagaggatgatcagccacactgggactgagacacggcccagactcctacgggaggcagcagtggggaatcttggacaatgggggcaaccctgatccagccatgccgcgtgatcgatgaaggccttagggttgtaaagatctttcagctgggaagataatgacggtaccagcagaagaagccccggctaactccgtgccagcagccgcggtaat

SEQ ID NO: 4909 - DNA, 490 bp, Unknown
  Ascusbbf_1346565, encodes 16S rRNA
agagtttgatcatggctcaggacgaacgctggcggcgggcttaacacatgcaagtcgaacggtaaggccgcttcgggggtacacgagtggcgaacgggtgaggaacacgggaggaacctgcccgggactctgggataagcagtcgaaagggtggcgaagactggataggacctgtgactgcatggtggtgggtggaaaggattttgcggggctgggaggggctcgcggccgatcagcttgttggtggggtgagggccgaccaaggcgtcgacgggtagccggcctgagagggcgaccggccccactgggcctgcggtacggccccgactcctacgggaggcagcagtggcgaatcttgcgctctgcgcggacgcctgccgcagcaacgccgcgtgcgggctgacggccttcgggttgtccaccgctttccgcagggacgacgattttttgacggtacctgcagaagaagcaccggcccactacgtgccag

SEQ ID NO: 4910 - DNA, 490 bp, Unknown
  Ascusbbf_1378644, encodes 16S rRNA
agagtttgatcatggctcaggacgaacgctggcggcgtgcttaacacatgcaagtcgaacggtaaggcctcttcgggggtacacgagtggcgaacgggggaggaacacgtgagtaacctgccctggactctgggataagcagtcgaaagggtggcgaagactggataggacctgtgactgcatggtggtgggtggaaaggatttttctggtctgggaggggctcgcggccgatcagcttgttggtggggtgatggccgaccaaggcggcgacgggtagccggcctgagggggcgaccggccacactgggactgcggtccggccccgactcctccgcgaggcagcagtggggactattgcgccatgggcggaagcctgccgcagcaacgccgcgtgcgggatgacggccttcgggttgtccaccgctttcagcagggacgacgattttttgacggtacctgcagaagaagcaccggccaactacgtgccag

SEQ ID NO: 4911 - DNA, 486 bp, Unknown
  Ascusbbf_1346561, encodes 16S rRNA
agagtttgatcctggctcagaacgaacgctggcggcaggtcttaggcatgcaagtcgaacggacgacagagtggcttgccattctgaagttagtggcgcacgagtgagtaacgcgtgggaaactgcccttcactggggaataacgtctggaaacggacgctaataccgcatacgcccgcaagggaaacgatttatcggtgatggatgtgcccgcgttggattagcgtgttggtggggtaatggcctaccaaggcgatgatccatagctggtctgagaggacgatcagccacgctggaactgagacacggaccagagacctacgtggggcagcagctaagagtatggggcaatggaggaaagtctaggacagagatgccgcgtgaatgaagaaggccttctggtagtaaagttctggtagtcatgaggatgttgacagtagtgaaagaaaaagcaccggctaactccgtgccagcagccgcggtaat

SEQ ID NO: 4912 - DNA, 490 bp, Unknown
  Ascusbbf_1444368, encodes 16S rRNA
agagtttgatcctggctcaggatgaacgctagcggcaggcttaacacatgcaagtcgaggggtaacgcgaggtagcaatactctggcgacgaccggcgcacgggtgcgtaacgcgtatgcaacctacctgtaacaggtgtataacggagagaaatttccactaatccaccatattgttattctttcgcatgttaggataacgaaagcttcggtggttacggatgggcatgcgtgacagtagctagttggtaagggaacggcttacaaaggcgacgatgtctaggggagcggtgaggctgtagccccataccgggcatggcaaagcggaccagactcctccgggaggcagaagtgatgaatgttgttaaatggacgaaagtctgaaccagccatgccgcgtggaggaagaaggtcctatgggttgtaaactccttttgttcgagagtaataagaggcttgcgagcctcgatgagagtatcggacgaataag

SEQ ID NO: 4913 - DNA, 490 bp, Unknown
  Ascusbbf_1346564, encodes 16S rRNA
agagtttgatcatggctcaggacgaacgctggcggcgtgcttaacacatgcaagtcgaacggtaaggcctcttcgggggtacacgagtggcgaacgggggagtaacacgtgagtaacctgccctggactctgggataagcagtcgaaagggtgtcgaagactggataggacctgtgactgcatggtggtgggtggaaaggatttctctggtctgggaggggctcgcggcctatcagcttgttggtggggtgatggccgaccaaggcgtcgacgggtagccggccggagagggcgaccggccccacttggactggggtccggccccgcctcctacgggcggcagcagtggggaatattgcgccatgtgcggacgcctgccgccgcaccgccgcgtgcgggatgacggccttcgggttgtacaccgctttcagcagggacgacgattttttgacggtacctgcagaagaagcaccggcccactccgtgccag

SEQ ID NO: 4914 - DNA, 490 bp, Unknown
  Ascusbbf_1378643, encodes 16S rRNA
agagtttgatcatggctcaggatgaacgctagcggcaggcttcacacatgcaagtcgaggggtaacgcggggtagcaatactctggcgacgcccggcgcacgggtgcgtaacgcgtatgcaacctacctgtaacaggggtataacggagagaaatttccactaatcccccatattgttagagattcgcatgtttctctaacgaaagcttcggtggttacggatgagcatgcgtgacattagctagttggtaaggtaacggcttaccaaggcgacgatgtctaggggagctgagaggcttatacccaaagtgggtaatgagacacggaccagaatcctacggggggcagcagtgaggaagattggtcaatggacggaagactgaacaagccatgccgcgtggaggaagaaggacctatgggttgtaaactccttgtgttcgagagtaataagaggcttgcgagcctcgaggagagtatcggacgaataagc

SEQ ID NO: 4915 - DNA, 490 bp, Unknown
  Ascusbbf_1346478, encodes 16S rRNA
agagtttgatcctggctcaggatgaacgctagcgacaggcttaacacatgcaagtcgtggggcagcatgatcgaagctggctttgattgatggcgaccggcgcacgggtgagtaacgcgtatccaaccttccctatactagaggatagcccggcgaaagtcggattaatacgctatgttgtattgagatgatgtgtgaagaataggaaagattcatcggtataggatggggaggcgtctgattaggttggtggcggggtaacgccacaccaagcccacgatgagtaggggttatgagaggaaggtccaccagaatggaactgaacaccgaaccaaacacctcagggaggaagcagtgagaaatattggtcaatgaaacacagtcgcagccagccaagtagcgtgcagaatgccggcccgttgggttgtaaactgcttttatatagggataaagtcggagacgtgtccccgtttgtaggtactatatgaat

SEQ ID NO: 4916 - DNA, 490 bp, Unknown
  Ascusbbf_1378681, encodes 16S rRNA
agagtttgatcctggctcaggatgaacgctagcggcaggcttaacacatgcaagtcgaggggcagcgcggggtagcaatcctctggcggcgaccggcgggggggtgcgtaacgcgtgagcaacttgcccgtcactggggggtaggcactgggaacggtgtgtaattctccctaacatatggattcacatggattcatattgaaagattcgttggtgacggatgggctcgcgtaacataagctagttggcggggtaacggcccaccgaggctacgatgtttaggggttctgagaggaaggtcccacacgatgggactgagggacgggccagattcctacggcaggaagcagtaaggaatattggtcaatgagcggaagcctgaaccagccatgccgcgtggaggaagaaggccctatgggttgtaaactccttttgttcgagagtaataagggctttgagaagcccgatgagagtagcggacgaataagca

SEQ ID NO: 4917 - DNA, 490 bp, Unknown
  Ascusbbf_1444658, encodes 16S rRNA
agagtttgatcctggctcaggataaacgctggcggcgcacataagacatgcaagtcgaacgaacttaatcgaaagtttacttttgaagcggttagtggcggactggtgagtaacgcgtaagcaatctgcctatcagaggggaataacagtgagaaatcattgctaataccgcataagctgtgagtatcgcatactacaactagaaaaggagcactccgctgatagatgagcttgggtctgattagttaggtggtggggtaccggcctaccaagacgaggatcagtagccggactgagaggtaaaacggcaacattgggactgaggtacggcccagaaacctacggagagcagcaggcgggaatatggcgaaatggaggaaactctgaggcagagacgccgcgggcaggaagaaggtttgcggattgtaaactgctttagatagggaagaaaaaaaatgacggtacctatagaataagcaccggctaacta

SEQ ID NO: 4918 - DNA, 486 bp, Unknown
  Ascusbbf_1444326, encodes 16S rRNA
agagtttgatcctggctcagaacgaacgctggcggcaggtcttaggcatgcaagtcgaacggacgccagagtggcttgccattctgaagttagtggcgcacgagtgagtaacgcgtgggaaactgcccttcactggggaataacgtctggaaacggacgctaattccgcatacgcccgccaggggaaagaattatcggtgatggatgtgcccgcgttggattagcttgttcgtggggtaatggcctagcaaggcgatgatccatagctggtctgagaggacgatcagccaccctggaactgaggaacggtccagactcctacggggggcagcagcgaagaatattgggcaatggcggaaactctgacccagccatgccgcgggaatgaagaaggccttcggggtgtaaagttcttgtagtcatgaagatgatgacagtagtgacagaaaaagcaccggctaacttcgtgccagcagccgcggtaat

SEQ ID NO: 4919 - DNA, 490 bp, Unknown
  Ascusbbf_1378669, encodes 16S rRNA
agagtttgatcctggctcaggatgaacgctggcggcgtgcctaatacatgcaagtcgaacgaggtttctcttcggggaaaccgagtggcgaacgggtgagtaacacatagttaatctacctttcagaatgggatacccaagagaaattttggctaataccgtatacaatcatttctccgcttggagatttgatgaaaggggctccaaagcctcgctgttagcttaacctgtggcacattggctagttggtgatataacagcccaccaaggcgaagaggtgtagccgatctgaaaggaaaatcaggcaaattggatcttggacccggcccatactcccacggtaggcagcagtagggagctttcggcaatgggggaaaccctgaccgagcacagccgcgtgatttagaaggccctctgggtcgtaagaatctgttgtaaaggagaaatggtagtgggaggaaatgcccattatttgatagtactttattag

SEQ ID NO: 4920 - DNA, 490 bp, Unknown
  Ascusbbf_1346524, encodes 16S rRNA
agagtttgatcctggctcaggatgaacgctagcggcaggcttaacacatgcaagtcgaggggtaacgcggggtagcaatactctggcgacgaccggcgcacgggtgcgtaacgcgtatgcaacctacctgtaacaggggtataacggagagaaatttccactaatcccccatattgttagagattcgcatgtttctctaacgaaagcttcggtggttacggatggacatgcgggactttggcaagttggtaaggtaacgacttaccaaggcgacgatgtctaggggagctgggaggcttatcccccacacaggtagtgagacacggaccaaactcctgcgggaggcgtcagtgaggaagattagtcaatggacggaagtctgaaccagccatgccgtgtggaggaagaaggtcctatgggttgtaaactccttttgttcgagagtaataagaggcttgcgagcctcgatgagagtatcggacgaataagc

SEQ ID NO: 4921 - DNA, 490 bp, Unknown
  Ascusbbf_1378945, encodes 16S rRNA
agagtttgatcctggctcagaacgaacgctggcggcaggcttaacacatgcaagttggacgggaatcgattgatagcttgctattgcttgaggagagtagcgcacgggtgagtaacacgtgggaacataccgtatagtgggggataacaattggaaacgattgataataccgcataagtcctaagggagaaaggagtaattcgctataagattggcccgcggaagattaggcagtgggtggggtaaaggcctaccaaacctacgatctatagctggtctgcgaggacgatcagccacattgggcctgtgcctcggccccaactcctacgggcggccgccgtggggactcttgggcactgggggcacccctgccccggccctgccgcgtgagtgaagccggttttcgacttgtaaagctctttcggatgtgaagctgatgacggtagcctctcaagacgccccggcaaccttcgtgccagcagccgcggta

SEQ ID NO: 4922 - DNA, 490 bp, Unknown
  Ascusbbf_1346843, encodes 16S rRNA
agagtttgatcatggctcaggataaacgctggcggcgtacataagacatgcaagtcgaacggccgcaatcaatagtttactattgttgcggttagtggcggactggtgagtaacacgtatgtaacctgcctatcagaggggaacaacagctagaaatgactgcgaagaccgcatatgccataactagcgcatgacagaagtgggaaaggagcaatccgctgagagatggacttgcgtctgattagatagttggtggggtaacggcccaccaagtcgacgatcagtagccggactgagagggtaaccggccacgttgggcctgcgtgacggcccggactcctacgggcggcagccgtcgggactattgcgcactggcggaaactctgacgcagtgccgccgcgtgcagggagaaggttttcggattgtaaactgctttagacagggaagaaacacgacagtacctgtagaataagctccggctaactacgt

SEQ ID NO: 4923 - DNA, 490 bp, Unknown
  Ascusbbf_1444314, encodes 16S rRNA
agagtttgatcatggctcaggatgaacgctagcgacaggcctaacacatgcaagtcgaggggcagcgcgggagaagcttgcttttcctggcggcgaccggcgcacgtgtgcgtaacaggtgtgcaatctttccatcgtcggggaatagcccagcgaaagttggattactgctccatgtttcacgaagccgcatgactttgtgatgaaacgtaattcctctggttgagcacgcttctgcgtagatagttggtgagttaacgtctcaccaagtctactatcagtcggggttctgcgagaaaggccccacaactaggaactgggaaacggtccaaacgcctacgggaggcagccgtgaggaagattggtcaatgggcgagagcctgaaccagccaagtagcgtgaaggatgaaggttctatggattgtaaacttcttttgtccgagggtaaaaaaggccacgtgtggctgcttgcaagtatcggacgaataag

SEQ ID NO: 4924 - DNA, 486 bp, Unknown
  Ascusbbf_1378986, encodes 16S rRNA
agagtttgatcctggctcagaacgaacgctggcggcaggtcttagacatgcaagtcgaacggccgccagactggcttgcccttctgatgttagtggcccacgagtgcgtaacgcgcgggtaactgcccttcactggggtataacgtctggaaacggacgccactaccgcatacgcccgcttcgggtacggtgtctcggttgtggatctgccggcgttgggttagcttgttggtggggtaattgccttcctaggcggtgatccctggctggtctgagacgacgagcaggcactatggaactgggacacggtccagactccgacgggaggcagcagctaagaatattgggcaacggaggagactccgacccagccatgccgcgtgaaggaagaaggccttcgggtgggaaagtgcgtggagtcaggaagatgatgacagtagtgaaagaaaaagcaccggctaactgcgtgccagcagccgcggtaat

SEQ ID NO: 4925 - DNA, 490 bp, Unknown
  Ascusbbf_1444318, encodes 16S rRNA
agagtttgatcatggctcaggataaacgctggcggcgtacataagacatgcaagtcgaacggtcccattctatcgcttacttttttttcgtttagtcgcggacccgtgagtaacacgtatgtaacctgcctatcagagtggaacaccagctagaaattacttccatgaccgcatatgccataactatcgcatgacagaagtgggaaaggagcaatccgctgatagatggacttgcgtctgattagatagttggtggggtaacggcctaccaattcgacgatcagtagccggactgagagggtcatcagcgacattgggactgatatccggcccaggctcctacggggggcagcagtcgggactattgcgcaatggaggaaactctgacgcagtgccgccgcgtgcaggcagaaggttttcggattgtaaactgctttagacaggggagaaacacgacggtacctgtagaataagctccggctaactacgt

SEQ ID NO: 4926 - DNA, 486 bp, Unknown
  Ascusbbf_1444366, encodes 16S rRNA
agagtttgatcctggctcagaacgaacgctggctgcaggccttaggcatgcaagtcgaacggccgccagagttgcttgcccttctgtagttagtggcgcacgagcgagtaactcgtgcgtaaccgcccttcactgtggtataacgtctggcaacggacgctaataccgcacacgaccgcatggggtacgatttagagtgtgtggttgtgcacaggtcggtttagcttgttggtggggcaatggcataccatggcgatgatacatagctgacctgagaggatgatcagccacgctggaactacgacacggtccagactcctacggtaggcagcagctaagaatattgggcaatggaggaaactctgacccagccatgccgcgtgaatgaagaaggccttcgggttgtaaagttcttttagtcatgaagatgatgacagtagcgacagaaaaagcaccggctaacttcgtgccagcagccgcggtaat

SEQ ID NO: 4927 - DNA, 282 bp, Unknown
  Ascusbbf_1346528, encodes 16S rRNA
agagtttgatcatggctcaggatgaacgctagctacaggcttaacacatgcaagtcgcgcagcatcatggcatgtagcaatacatgctgatggcgaccggcggatgggtgtgtgacgcgtagccaacctggccctatctcgaacacagcacctcgaaagagggattacggccctatgttccctaaactcctcatgttagcgagcaaacggtggcacttgtgccattcagggagtacctttcgattaagcatcggccaacgccgcggcagcacgcgcggtaat

SEQ ID NO: 4928 - DNA, 486 bp, Unknown
  Ascusbbf_1318961, encodes 16S rRNA
agagtttgatcatggctcagaacgaacgctggctgcaggtcttagacatgcaagtcgaacggacgacagagtgtcttgcccttctgatgttggtggcgcacgagtgagtgactcgcgggtaactgcccttcactggggaataacgtctggcgacggacgctaataccgcatacgccctcaaggggagatctttatcggtgatggatgtgcgcgcgttggactgggttgttggtggggtaatggccttcataggcgatgtaccatacctggtatgcgaggacgatcagccaccctggaactacgacacggtccagactcctacgggaggcagcagctaagaatatgaggcaatggaggaaactctgacccagccatgccgcgtgaatgaagaaggccttcgggttgtaaagttcttttagtcgtgaagatgatgacagtagtgacagaaaaagcaccggctaacttcgtgccagcagccgcggtaat

SEQ ID NO: 4929 - DNA, 490 bp, Unknown
  Ascusbbf_1378975, encodes 16S rRNA
agagtttgatcatggctcaggatgaacgctagcggcaggcttaacacatgcaagtcgaggggtaacgcggggtagcaatactctggcggcgaccggcgcacgggtgcgtaacgcgtatgcaacctacctgtaacaggggtataacggagagaaatttccactaatcccccatattgttattctttcgcatgttaggataacgaaagcttcggtggttacggatgggcatgcgtgacattagctagttggtaaggtaacggcttaccaaggcgacgatgtctaggggagctgaggggcttatcgaccacagtggtactgagacacggagcgaactgagagagggggcagcagcgaggaatatgggtcagtggacagaagtctgaaccagccatgcggcgtggaggaagaaggcccgaggggttgtaaactccttttgttcgagagtaataagggcgtggcgaagccagatgagagtatcggacgaataagc

SEQ ID NO: 4930 - DNA, 490 bp, Unknown
  Ascusbbf_1346456, encodes 16S rRNA
agagtttgatcctggctcaggacgaacgctggcggcgtgcttaacacatgcaagtcgaacggagtgcttctgtaggaggattcgtccaacggaaggagtaacttagtggcggactggtgagtaacgcgtgaggaacatgcctttcagagggggacaacagttggaaacgactgctaataccgcatgatgcatgaccggggcattccggacatgccaaagatttatggctgaaagatggcctcgcgtctgattagatagttggtggggtaacggcccaccaagtcgacggtcagtggcaggactgggaggggaacggggcacaatgggactgagagacgggccagactcctacgggagggagaagtggggaatattgggcgatagacgcaagtctgacccagcgacgcggcgtgaaggaagaaggctttcgggtggtaaacgtcttttaagggggaaggggtgaagacggtaccccttgaataagcaacgg

SEQ ID NO: 4931 - DNA, 490 bp, Unknown
  Ascusbbf_1378757, encodes 16S rRNA
agagtttgatcatggctcaggatgaacgctagcgacaggcctaacacatgcaagtcgaggggcagcgcgggagaagcttgcttttcctggcggcgaccggcgcacgggtgcgtaacaggtgtgcaatctgtccatagtcggggaatagcccagcgaaagttggattaatgctccatgtgaatcgagaccgcatgatcttgatttgaaacgtaaggactatgggtgagcacgcttctgattagctcgttggcggggcaacggcccaccacgacgacgatcggtagccggcctgatgggttggaccgcaacagtgagaagaagagacggcacggactccgacgggaggcagaggtagggaatattgaacgatgggggaaaccctgatgcagcaacgccacgtgtgggaagaagcatttcggtgtgtaaaccactgtcgtgagggaataaggcattgtttcggcgatgttgaatgtacctcgagaggaagcac

SEQ ID NO: 4932 - DNA, 490 bp, Unknown
  Ascusbbf_1346598, encodes 16S rRNA
agagtttgatcctggctcaggacgaacgctggcggcgtgcttaacacatgcaagtcgaacgatgatgaccggagcttgctttggttggattagcggcgaacgagtgagtaacacgtgagtaacctgcccccttcttcgggataaccactggaaacggtggctaatattgggtatgacatcagatcgcatggattggtgtggaaaggttttttctggtgggggatgggaacgcggtctatcagctggttggtggggggatggcctaccaaggtctgatgggtagccggcctgagcgggcgaccggccaagctgggactgggacacggcccagactcctacgggaggcagcagtcgggaatattgcacaatgggggaaaccctgatgcagcgacgccgcgtgggggatgaaggccttcgggttgtaaacccctttcagtaaggaacaaggccatgattgttgttgtggttgagggtacttgcagaagaagcg

SEQ ID NO: 4933 - DNA, 486 bp, Unknown
  Ascusbbf_1444536, encodes 16S rRNA
agagtttgatcctggctcagaacgaacgctggcggcaggccttaggcatgcaagtcgaacggacgacagagtggcttgccattctgaagttagtggcgcacgcgtgagtaacgcgtgggaaactgcccttcactggggaataacgtctggcgacggacgctaataccgcatacacccgcaaggggaaagatttatcggtgatggatgtgcccgcgttggattagctggttggtggggtaatggcctaccaaggcgaggatccatagctggtctgagaggacgatcagccacgctggaactgagacacggtccagactcctacgagaggcggcagcaacgaatagtgggcaatggaggaaactctgacccggccatgccgcgtgaaggaagaaggccttcgggtcgtaaagttcttttagtcatgaagatgatgacagtagtgacagaaaaagcaccggctaactccgtgccagcagccgcggtaat

SEQ ID NO: 4934 - DNA, 490 bp, Unknown
  Ascusbbf_1346675, encodes 16S rRNA
agagtttgatcctggctcaggataaacgctggcggcgcacataagacatgcaagtgaacggacttaactcattcttaacgattgagagcgtttagtggcggacttgtgagtaatttataagtaacctgcctatcagaggggaacaacagttggaaacgactgctaataccgcatatgccacgagaatcacatggttcaagtgggaaaggagcaatccgctgatagatggccttatatctgattagctagttggtggggtaacggcctaccaaggcgacgatcagtagccggactgagccgttaaacggcaacattgggactgagaaacggcccagactccaccgggaggcagcagtcggaaatatggagaaagggaggaaactctgaggaagtgacgccgcggggaggaagaaggttttcggactgtaaactgctttagacagggaagaaaaaagacagtacctgtagaataagctccggctaactacgt

SEQ ID NO: 4935 - DNA, 490 bp, Unknown
  Ascusbbf_1346590, encodes 16S rRNA
agagtttgatcatggctcaggacgaacgctggcggcgtgcttaacacatgcaagtcgaacgctgaagctcccagcttgctgggggtggatgagtggcgaacgagtgagtaacacgtgagtaacctgcccctgactctgggataagcactagaaatggtgtctaatactggatatatctcatggccgcatggtcggtgagtggaaagatttatcggttggggatggactcgcggcctatcagctagatggtgaggtactggctcaccatgtcgacgactggtagccggcctaggagggtgaccggcaacactgggacggggacacggcccagactcctacgggaggcagcagtggggaatattgcacaatggacgcaagcctgatgcagcaacgccgcgggagggatgacggccttcgggttgtaaacctatgttagtagggaagaagcgaaagtgacggtacctgcagaaaaagcaccggctaactacgt

SEQ ID NO: 4936 - DNA, 490 bp, Unknown
  Ascusbbf_1378722, encodes 16S rRNA
agagtttgatcctggctcaggacgaacgctggcggcatgcttcacacatgcaagtcgaacggactgcttccttcgggcttacagttcgtggcgaacgggtgagtaatgtatgagccacctgcctctatcaacggtctaacagttggaaacgcctgctattacggtctaagaccacggcaccgcatgattctgcggtaaaatatttttcggatatcgatgggctcatatccccttagctggttggtgggaaaaccgcccaccaaggcgacgatgggtagccgagctgacaggctgctcggcaacattgggacggaaacacggcccagactccgacgggaggcagcagtggggaatagtgggcaatggaggcaacgctgacccagcaatgccgcgtgagtgaggaaggtaattttagtgtaaagctcttttcgcaggaacgaataaagatgacggtacctgaggaataagccccggctaactacgtggcagc

SEQ ID NO: 4937 - DNA, 490 bp, Unknown
  Ascusbbf_1444554, encodes 16S rRNA
agagtttgatcctggctcaggacgaacgctggcggcatgcttaacacatgcaagtcgaacggactgattccttcgggctgatagtttgtggcgaacgggtgagtaatgtatgagcaacctgcctctatcaacgggataacagttagaaacgactgctaatacggtataagaccacggcaccgcatgatgctgcggtaaaagatttttcggatagagatgggctcatatcccattagctagttggtgagataacagcccaccaaggcgacgatgggtagccgagctgagaggatgatcggccaaaaagggaactgaacaacggcccgagagctacgggaggcagcagtggggaatattgggcaatggaggcaactctgacccagcaatgccgcgtgagtgaggaaggtaattttatggtaaagcgctcttctcaggaaggaataaagatgacggtaccggaggaagaagccccggctaactacgtgccagc

SEQ ID NO: 4938 - DNA, 490 bp, Unknown
  Ascusbbf_1378726, encodes 16S rRNA
agagtttgatcatggctcaggatgaacgctagcggcaggcttaacacatgcaagtcgaggggcagcgcggggtagcaatactctggcggcgaccggcggaagggggcgtaccgcgtgagcaacgtgcccgtcactgggggagaggcactggaaacggtgtgtaatactccataccatatgtcttcacatggattcatattgcaagattcgttggttacggatgggctcgcgtaacattcgccagtcggcggggtaacggcccacccaggcgacgatgtttaggggttctgcgaggaaggtcaccagcgctgacactggacaacggtccagattcctacgggaggcagcagtgaggaatattggtcaatgggcggaagcctgaaccagccatgccgcgtgaaggaataaggccctatgggtcggaaactgcttttccttgagggaaataagggtaacgtgtggcccgatgagagtatcaggggaataagca

SEQ ID NO: 4939 - DNA, 490 bp, Unknown
  Ascusbbf_1444562, encodes 16S rRNA
agagttgatcatggctcaggatgaacgctgacggcgtggttaacacaggcaagtagaacggagggagcgcgcggaggagagcttgctcaaagcgggagagaacggagtggcggacgggtgaggaacgcgtggataacctgccggatacggggggagaacactgagaaataggttctaataccgcataagcgcacgttcccgcatgggaaagtgtgaaaaacgccggtggcgtaagatggatccgcgtctgattagatagttggtggggtaacggcccacaaagccaacgatcagtagccggcctgcgagggggcacggccacagtgggactgcgacacggccccgactcctacgggaggcagcagtggggcatcttgcacaatgggggaaaccaggatgcagcgacgccgcgtgagtgaagcagtatttcggtatgtaaagctctatcagcaaggaagaaaaaaatgacggtacttgactaagacgcccc

SEQ ID NO: 4940 - DNA, 490 bp, Unknown
  Ascusbbf_1444549, encodes 16S rRNA
agagtttgatcctggctcaggacgaacgctggcggcgtgcttaacacatgcaagtcgaacgggagtatcaaagaagcttgcttttatgatactttagtggcggacgggtgagtaacgcgtgaggagctgtcctatgcagggggacaacagttggaaacggctgctaataccccataagccgagaggtaaaaggttttgtccggcaaaggaggcactcgcgtcctatcagctagtgggttgggtaacggccgacctaggcgaagacgggtagccggcctgagagggcgaacggccacactggaacggagagacggtgcagactccgacgggagggagaagtggggaatattgggcaatgggggcaaccctgagcgagcgacgcggcgtgggtgaagaaatccttcgggatgtaaagcgctgttgtaggggaagagtagaagacggtaccatacgaggaagccccggcaaactacgtgccagcagccgcggt

SEQ ID NO: 4941 - DNA, 490 bp, Unknown
  Ascusbbf_1346603, encodes 16S rRNA
agagtttgatcctggctcaggatgaacgctagcggcgtgcctaacacattcaagtcgaacggagatatactgaagcttgcttttgtctattttagtggcggacgggtgagtaatgcatgagcaacctgccttaacgagtgggataacacagagaaatttgtgctaataccgcataagctgcgaaggagtcctctcccattcagaaaaggagcaatccgctttaagatggtctcatgtctgattctatagtttgtagggtaacggcctaccaagccggcgatcattagccggactgagaggtagaacggacaacacggaacagagctacggtccagactcgtacgggaggcagaagtggggaatattgggcaaggggcgaaagcctgacccagcaacgccgcgtgaaggaagaaggtcttcggattgtaaactgcgtggacaggggacgaagcatgacggtaccctgaaaacaagccacgactaactacgt

SEQ ID NO: 4942 - DNA, 486 bp, Unknown
  Ascusbbf_1444624, encodes 16S rRNA
agagtttgatcctggctcagaacgaacgctggcggcagggctgaggcatgcaagtcgaacggacgacagagtggcgtgccattctgaagttaggggcgcacgggtgagtaacgcgtgggaaacggcccttcactggggaataacgtcgggaaacggacgctaagaccgcatacgcccgcaaggggaaagagttatcggtgatggatgtgcccgcgtgggagtagcgtgttggtgggggaatggcctacaaaggcgaggagccatagctggtctgagaggacgatcagccacgctggaacggcgacccggtcccgactcctacgggcggcagccgctcagactcttgggcactggcggaccctctgcccccgccctgccgcgtgaatgaagacggccttcgggttgtatagttcttttagtcatgaagctgatgcccgtagtgacagaacaagcaccggctaacttcgtgccagcagccgcggtaat

SEQ ID NO: 4943 - DNA, 486 bp, Unknown
  Ascusbbf_1444625, encodes 16S rRNA
agagtttgatcatggctcagaacgaacgctggcggcagggctgaggcatgcaagtcgaacggacgacagagtggcgtgccattctgaaggtaggggcgcacgggtgagtaacgcgggggaaacggcccttcactggggaataacgtcgggaaacggacgcgaagaccgcagacgcccgcaaggggaaagaggtagcggtgacggatgggcccgcgtgggagtagcgtgtggggggggtaatggcctaccaaggcgatgtgccagagctggtctgagaggacgatcagccacgctggaactgcgccccggtcccgactcctccgggcggcggccgctccgcctcttggccactggcggaccctctgcccccgccctgccgcgtgaatgacgccggccttcgggttgtacagttcttttagtcctgacgctgatgacagtagtgacagaacacgcaccggctaccttcgtgccagcagccgcggtagt

SEQ ID NO: 4944 - DNA, 486 bp, Unknown
  Ascusbbf_1346461, encodes 16S rRNA
agagtttgatcatggctcagaacgaacgctggcggcaggtcttaggcatgcaagtcgaacggacgacagagtggcttgccattctgaagttagtggcgcacgagtgagtaacgcgtgtgaaaccgcccttccctggggaataccgtctggctacggacgctactaccgcatacgcccgccaggggaaagatttatcgttgatggatgtgcccgcgttggattagcttgttggtggggtaatggcctaccaaggcgatgatccatagctggtctgagaggacgatcagccacgctggaactgagaaacgggccagactcctacgggaggcagcagctaagaatattggacaatggaggaaactctgacgcagccatgccgcgtgaatgaagaaggccttcgggttgtaaagttcttttagtaatgaagatgatgacagtagtgacagaaaaagcaccggctaacttcgtgccagcagccgcggtaat

SEQ ID NO: 4945 - DNA, 490 bp, Unknown
  Ascusbbf_1444672, encodes 16S rRNA
agagtttgatcctggctcaggatgaacgctagctataggcttaacacatgcaagtcgcggggcatcatggcatgtagcaatacatgctgatggcgaccggcggatgggtgagtaacgcgtatccaaccttgccctatctcgggtacagcccctcgaaagagggattaatccccgatgttccctgtgatccgcatgttttccagggcaaaggcattagtcggatagggatgggagagcgttccgttatgcagtcggcggggtaacgccccaccgagactacgatggagaggggttctgagaggaaggccccccacactggtactgagacacggcccagactcctacgggaggcagcagtgaggaatattggtcaatggcggcaacgctgaaccagccaagtagcgtgaaggatgacggccctatgggttttaaacctcttttgttagggagcaacctatggcactagtgccatactgcgagtacctttcga

SEQ ID NO: 4946 - DNA, 490 bp, Unknown
  Ascusbbf_1324126, encodes 16S rRNA
agagttttatcctggctcaggatgaacgctggcggcgtgcttaacacatgcaagtcgaacggagttatctcgctgaggagagcttgcgcaaatcgtgagataagttagtggcggacgggtgagtaacgcgtggataacctgcattataccgggggataacacttagaaataggtgctaatgccgcataagcgcacgagccggcatgggaaagtgtgaaaaactccggtggtataagatggatcggcgtctgataagaaagtcggtgaggtaacggcccaccaagacaacgatcagtagccggcctgagggggtgaacgaccaccgtggaactgagacacagcccaaactcctacggggggcagcagtggtgaatattgcacaatgcgggaaaccctgatgcagcgacgccgcgtgggtgaagaagtatttcggtatgtaaagctctatcagcaaggaagaaaaaaatgacggtacttgactaagaagccc

SEQ ID NO: 4947 - DNA, 486 bp, Unknown
  Ascusbbf_1444674, encodes 16S rRNA
agagtttgatcatggctcagaacgaacgctggctgcaggtcttaggcatgcaagtcgaacggacgacagagtggcttgccattctgaagttagtggcgcacgagtgagtaacgcgtgggaaaccgcccttcactgtggaataacgtctggaaacggacgctaataccgcatacgcccgcaaggggagagatttatcgctgttggatgtgcccgcgttggattagcttgttggtggggtaatggcctaccaaggcgatgatccatagctggtctgagacgacgatcagccacgctggaactgcgacacggtccagactcgtacgggaggcagcagctaagaatattgggcaatcgaggaaagtgtgagctagccatgccgtgtgaatgaagaaggccttcgggttgtaaagttcttttagtcatgaagatgatgacagtagtgacagaaaaagcaccggctaacttcgtgccagcagccgcggtaat

SEQ ID NO: 4948 - DNA, 490 bp, Unknown
  Ascusbbf_1378771, encodes 16S rRNA
agagtttgatcatggctcaggatgaacgctagctacaggcttaacacatgcaagtcgcggggcatcatggtgtgtagcaatacacactgatggcgaccggcgaatgggtgattaacgcgtatccaacctggccctatctcgggcacagcccctcgaaagagggattaattcccgatgttcccacgagttcgcatgttcttgtgggtaaaggcctttgccggatagtgattgggatgcgttccattacgcggtcggcggggtaacggcccaccgagccttcgatggataggggttctgagagcatgccacacaacacggggaaggacgaaaggcccagactcctacgggaggcagcagtgaggaatattggtcaatggcggcaacgctgaaccagccaagtagcgtgagggattacggccctatgggttttaaacctcttttgttggggagcaacctgtgccactagtggcacactgcgagtacccttcga

SEQ ID NO: 4949 - DNA, 490 bp, Unknown
  Ascusbbf_1444691, encodes 16S rRNA
agagtttgatcctggctcaggatgaacgctagcggcaggcttaacacatgcaagtcgaggggaaacgcggggaagaaatactctggcgacgaccggcgaccgagtccgtaacgcgtatgcaccctacctgtaacaggggaatacgggagagaaatttccactaatcccccatattgttattctttcgcatgttaggttaacgaacgcttcggtggttacggatgggcatgcgtgacattagcgcgtgggtacggtaacggcttcccaaggctacgttgtctaggggggctgcgagtcttatccaccacactggtactgagacacggaccagactcctacgggaggcagcagtgaggaatattggtcaatggacggaagtctgaaccagccatgccgcgtggaggaagaaggtcctatgggttgtaaactccttttgttcgagagtaataagaggcttgcgagcctcgatgagagtatcggacgaataagc

SEQ ID NO: 4950 - DNA, 490 bp, Unknown
  Ascusbbf_1323951, encodes 16S rRNA
agagtttgatcctggctcagattgaacgctggcggaatgctttacacatgcaagtcgaacggcagcacgggagcttgctcctggtggcgagtggcgaacgggtgagtaacatatcggaacgtacctagtaatgggggataactagtcgaaagattagctaataccgcatacgccctgagggggaaagcgggggatcgtaagacctcgcgttattagagcggccgatatctgattagctagttggtggggtaaaagcctaccaaggcgacgatcagtagctggtctgagaggacgaccagccacactggaactgggacacggtccagactcctacgggaggcagcagtggggaattttggacaatgggcgcaagcctgatccagccattccgcgtgagtgaagaaggccttcgggttgtaaagcgctttcgcaagggaagaaacgatgcagtcgaataaactgcgttaatgacggtaccttgataagaagc

SEQ ID NO: 4951 - DNA, 490 bp, Unknown
  Ascusbbf_1323967, encodes 16S rRNA
agagtttgatcctggctcaggatgaacgctagcggcaggcttaacacatgcaagtcgaggggtaacgcggggtagcactactctggctacgaccggcgcacgagtgcgtaacgcgtatgcaacctccctgtgacacggatataacggagagcaattttcactaatccccaatatttttattctttcgcatattaggataactaaagcttcggtggttacggattggcatgcgtgacattagctatttggtaaggtaacggcttacccaggcgacgatgtctaggggagctgcgaggcatatcccccacactggtactgagacacggaccagactcctacgggaggcagcagtgaggaatattggtcaatggacggaagtctgaaccagccatgccgcgtggaggaagaaggtcctatgggttgtaaactccttttgttcgagggtaataagggcgatgcgaagcccgatgagagtatcggacgaataagc

SEQ ID NO: 4952 - DNA, 471 bp, Unknown
  Ascusbbf_1259286, encodes 16S rRNA
agagtttgatcatggctcagaacgaacgctggcggcatgcttaacacatgcaagtcgaacgagggcttcggccctagtggcgcacgggtgagtaacgcgtaggtatctgccttgaagtggggaataacggtggaaaactgccgctaatgccgcatacgccctgagggggaaagctttatgcgctttgagaggagcctgcgtccgattaggtagttggtggggtaacggcctaccaagcccgcgatcggtagccggtctgagaggacgatcggccacactgggactgagacacggcccagactcctacgggaggcagcagtggggaatattggacaatgggcgcaagcctgatccagcaatgccgcgtgagtgatgaaggccttcgggttgtaaagctcttttgccgatgacgatgatgacggtagtcggcgaataagccccggctaacttcgtgccagcagccgcggtaat

SEQ ID NO: 4953 - DNA, 487 bp, Unknown
  Ascusbbf_1323984, encodes 16S rRNA
agagtttgatcatggctcagaacgaacgctggcggcaggcttaacacatgcaagttgagcgggattaattgatagcttgctattgattatgagagcagcgcactggtgagtaacacgtgggcacataccttttggtgtgggacaacagttggaaacgactgctaataccgcatcagccctaagggggcagatttatttccgaaagattggcccgcggacgattaggtagtaggtggggttacgtcccacctagccgacgatctatagctggtctgagaggacgattcgccacattggaactgagacacggtccagactcctacgcgaggcagcagtgaggaatattgggcaatggaggaaactcggacccagccatgccgcgtgagtgaagaaggttttcggattgtaaagctctttcagacgggaagatgatgacggtaccgtcagaagaagcaccggctaacttcgtgccagcagccgcggtaat

SEQ ID NO: 4954 - DNA, 490 bp, Unknown
  Ascusbbf_1377277, encodes 16S rRNA
agagtttgatcatggctcaggatgaacgctagcgacaggcctaacacatgcaagtcgaggggcagcgcgggagaagcttgcttttcctggcggcgaccggcgcacgggtgcgtaacaggtgtgcaatctgtccatagtcggggaatagcccagcgaaagttggattaatgctccatgtgtcacgacgccgcatgactttgtgatgaaacgtacggactatgggtgagcacgcttccgattagatagttggtgaggtaacggctcaccaagtcgccgatcagtaggggttccgagaggaagggcacccaaatgcgaacacagacaaggtcccaacgccagcgggaaggagcagtgaggaagaatggggaaagggcgagaggccgaaccagccagttcgcgtgaaggatgaagggtctagggagtgtaaacgtctttggtccgagggtaaaaaaggccacgggtggcttcttgcaagtatcggacgaataag

SEQ ID NO: 4955 - DNA, 490 bp, Unknown
  Ascusbbf_1347057, encodes 16S rRNA
agagtttgatcatggctcaggatgaacgctagcggcaggcttaacacatgcaagtcgaggggtaacgcggggtagcaatactctggcgacgaccggcgcacgggtgcgtaacgcgtatgcaacctacctgtaacagggggataacggagagaaatttcgactaatcccccatattgttagagattcgcatgtttctctaacgaaagcttcggtggttacggatgggcaggcgtgacattagctagttggtagggtaacggcttaccaaggcgaagatgtctaggggagctgagagtcttatcgcacacacgggtactgggacacggaccagactcctacgggaggcagcagtgaggaaaattgagcaatggacggaagtctgaaccagccatgccgcgtggaggaagaaggtgctatgggttgtaaactccttttgttcgagagtaataaggggctggcgagcctcgatgagagtatcggacgaataagc

SEQ ID NO: 4956 - DNA, 490 bp, Unknown
  Ascusbbf_1347145, encodes 16S rRNA
agagtttgatcctggctcaggatgaacgctggcggcgcgcttaacacatgcaagtcgaacggagttatctcgctgagtagagcttgctcaaatcttgagataacttagtggcggacgggggagtaacgcttggataacctgccttatactgggggataacacttataaataggtgctaataccgcataagcgcacgttcccgcaggcgaaagggtggaaaactcgcgtggtgtaagatggatcggggtcggattagatagttggcgaggtaacggcccaccaagtcaacgatcagtagccgacctgagagggggaacggcaacattgggcctcggacacgacccaaactcatacgggaggcagcggtggggaatattgcacaatgggggacaccctgatgcagcgccgccgcgtgggtgaagaagtatgtcggtatgtaaagctctatcagcaaggaagcaaaaaatgacggtacttgactaagaagccc

SEQ ID NO: 4957 - DNA, 490 bp, Unknown
  Ascusbbf_1377363, encodes 16S rRNA
agagtttgatcatggctcagagcgaacgctagcggaatgctttatacatgcaagtcgaacggattttgatctttgtcgcaatacaaagattacgattagtggcgaacgggtgagtaatagttaggaacttgccgaatagtgggggacaacagttagaaatgactgctaataccgcatactcccgagaggggctagatgttttgctattcgagaggcttaaccacgaatagcgtgttggcggggtaattgcccaccaaggcagtgatcgttagccgaccttagaggatgatcggccacattgggaccgagacacggcccagactcctacggtaggcagctgtacggaatattggacaatggacgcaagtcggatccagcaatcccgcgggagtgatgaaggtgttatgcatggtaaaactcttttgcccatgaagacaatgacggtagtgggagaataagcaccgactaactacgtgccagcagccgcggt

SEQ ID NO: 4958 - DNA, 490 bp, Unknown
  Ascusbbf_1446139, encodes 16S rRNA
agagtttgatcctggctcaggatgaacgctagctacaggcttaacacatgcaagtcgaggggtaacgtcagcgaaactttgctctttctacgcgaccagcggcgagtgggtgtgacacgcgtacaccccccgccgcaccctaggacacacccttgagacagtaagtataatgctctatcttctgtttcggggtcatgtgatttgcagaaaaggattagagctttgcgatggggatgcggttgtttaggttgttgggggggtacaggcccaccaagccgagggttagtgggggttctgagcggaagatccccaacattggaactgagacacggtccaaactcctacgggaggcagcagtgaggaatattggtcaatgggcgagagcctgaaccagccaagtagcgtgcaggacgaatgccctacgggttgtaaaccgcttttgcggaggaataaaatatgcgacgtgagaggcattgcaggtactccgcga

SEQ ID NO: 4959 - DNA, 490 bp, Unknown
  Ascusbbf_1347106, encodes 16S rRNA
agagtttgatcctggctcaggatgaacgctagcggcaggcttaacacatgcaagtcgaggggcagcgcggggtggcaatcctctggcggcgaccggcggaagggtgcgtaacgcgtgagcaacttgcccgtcactgggggataggcactggaaacggtgtgtaatactccataacatatggattcacatggatttatattgaaagactcgttggtgacggatgggctcgcgtaacattagctagtcggcggggtaacggcccaccgaggctacgatgtttaggggttctgggaggaaagtccccaaccatggaactgggagaacggtccaaaacccaacggcgggcgccagtggggaaaatgggtcaatgggcggaagcctgaacaagccatgcggcgggcaggaataaggccctatgggtcgtaaactgcttttccgtgagggaaataaggggaacgtgtggcccgatgagagtatcaggggaataagc

SEQ ID NO: 4960 - DNA, 488 bp, Unknown
  Ascusbbf_1347100, encodes 16S rRNA
agagtttgatcatggctcagaacgaacgctggcggcaggcttaacacatgcaagttgagcgggattgattgatagcttgctattgatcatgagagcagcgcactggtgagtaacacgtgggaacataccttttggtgggggacaacagttggaaacgactgctaataccgcataagccctgagggggaagattaattgccgagagattggcccgcgggagatttggtaggagggggggtgaacggcttacttgccggacgatctttggctggtctgagagaacgttcagccccattggaactgagacacggtccagactcatacgggaggcagcagtgaggaatattgggcaatggagggaactctgacccagccatgccgcgtgagtgaagaaggttttcggattgtaaagctctttcagacgggaagatgatgacggtaccgtcagaagaagcaccggctaacttcgtgccagcagccgcggtaat

SEQ ID NO: 4961 - DNA, 490 bp, Unknown
  Ascusbbf_1347115, encodes 16S rRNA
agagtttgatcctggctcaggatgaacgctagcggcaggcttaacacaagcaagtcgaggggtaacgcggggtagcaatactctggcgacgaccggcgcacgggtgcgtaacgcgtatgcaacctacctgtaacaggggtataacggagagaagtttccactaatcccccatattgggatgctggcgcaggttaggataacgaaagcttcggtggttacggatgggcatgcgtgacattagctagttggtaaggtaacggcttaccaaggcgacgatgtctaggggagctgagaggcttatccccaacactgggactgagccccccaccagactcctacgggaggcagccctccggaatattggtcaatggacggaagtctgaaccagccatgccgcgtggaggaagaaggtcctatgggttgtaaactccttttgttcgagagtaataagaggcttgcgagcctcgatgagcgtatcggacgaataagc

SEQ ID NO: 4962 - DNA, 485 bp, Unknown
  Ascusbbf_1446070, encodes 16S rRNA
agagtttgatatggctcagaacgaacgctggcggcaggtcttaggcatgcaagtcgaacggacgacagagtggcttgccattctgaagttagtggcgcacgagtgagtaacgcgtgggaaactgcccttcactggggaataacgtctggaaacgacggctaataccccatacgccggcaagggaaaagctttctcggtgagggttgggcccgcgtgggtttagcttgttggtggggtaatgtcctaccaaggcgatgatccatagcgggtctgagaggacgatcagccacgctggaactgggacacggtccagactcctacgggaggcagcagctaagaatattgggcaatggaggaaactctgacccagccatgccgcgtgaatgaagaaggccttcgggttgtaaagttcttttagtcatgaagatgatgacagtagtgacagaaaaagcaccggctaacttcgtgccagcagccgcggtaat

SEQ ID NO: 4963 - DNA, 350 bp, Unknown
  Ascusbbf_1346978, encodes 16S rRNA
agagtttgatcctggctcagaacgaacgctggcggcgaggctgaagcatgcaagtcgagcgggaggggcagcgaggccccgagagcggcggacgggggaggaacgcgcggacaaccgaccctccggcgggggagagccgagcgaaagcgcggagaacaccgcaggagacggagcgggggcggccctgcgccgggaaagcgcctgcgggcgcgccgggggacgggcgttgggcgcagcagcgtggtggcgtcgttttcgcgggggggcgcgaccgtggcagggaatgggcgcggggtgccgcggcccgaggaatacgccccggcaacctccgtgccagcagccgcggtaat

SEQ ID NO: 4964 - DNA, 490 bp, Unknown
  Ascusbbf_1377186, encodes 16S rRNA
agagtttgatcatgactcaggatgaacgctggcggcgtgcctaacacatgcaagtcgaacggaaaggattcttcggcattcttttagagggggacgggtgagtaacgcgtgggtaacctgccccatacaggggaacaacagctgtaaacggctgctaataccgcataagcgcacagtactgcatggtacagtgtgaaaagattttatcggtatgggatggacccgcgtctgattggctcgttggaggggtaacggcccaccacggcgacgctcagtcgccgacctgagagggtgaccggccacattggggctgagacacggaccaaactccgacgggaggcagaagtggtggatattgcacgatgggcggaagcctgatgcagcgacgccgcaggagtgaggaagtattgcggtatgtgaagctctatcagcagggaagaaaatgactgtacctgaataagaagccccggctaactacgtgccagcagcc

SEQ ID NO: 4965 - DNA, 490 bp, Unknown
  Ascusbbf_1377234, encodes 16S rRNA
agagtttgatcctggctcaggatgaacgctagcgataggcctaacacatgcaagtcgaggggcagcacatgaagtagcaatacggctggtggcgaccggcgcacgggtgcgtaacgcgtatgcaatctacctacaacaagggaataacccgttgaacgacggactaataccctataaaacaggggtcccgcatgggaatatttgttaaagatttatcggttgtatatgagcatgcgttccattagcttgttggtgagataacggcccaccaaggcaacgatggatagtgtaactgagaggttgatcgcgcacactggtactgtgacacgaaccagactcctacggaaggcagaagtgaggaatattggtcaatggacgaaagtctgaaccatccacgtcgcgtgaaggaagacggccctacgggttgtaaacttcttttgtaagggaataaagtgagtcacgtgtgactttttgcatgtaccttacgaat

SEQ ID NO: 4966 - DNA, 490 bp, Unknown
  Ascusbbf_1323559, encodes 16S rRNA
agagtttgatcatggctcaggatgaacgctagcggcaggcttaacacatgcaagtcgaggggcagcgcggggtagcaatactctggcggcgaccggcgggagggtgcgtaacgcgtgagcaacttgcccgtcactgggggataggcaccggaaacggtgtgtaatactccataacatatggattcacatggatttatattgaaagattcgttggtgacggatgggctcgcgtaacattagctagtcgaaggggtaacggcccaccgaggctgagatgtttaggggttctgagaggaaggtaccacaacatgtacatgagacacggtccagactcctacgggaggcagcagtgaggaatattggtcaatgggcggaagcctgaaccagccaagcagcgtgcaggaagaaggccctatgggtcgtaaactgcttttccttgggaacaatgaggggcacgtgtggcccgatgaaagtatcaggggaataagca

SEQ ID NO: 4967 - DNA, 490 bp, Unknown
  Ascusbbf_1377160, encodes 16S rRNA
agagtttgatcatggctcaggacgaacgctggcggcgcgcttaacacatgcaagtcgaacggtgaacagcggaaagcttgcttttagctgtacatagtggcggacgggtgagtaacgcgtgaggacttgtcctgtacagggggacaactgatggaaacgtcagctaataccccataagccgtgaggtaaaaggagcgatccggtacaggagagactcgcgttctatcagttagttggtgaggtaacggctccccaaggcgaagacggatagccggactgagaggttggccggccacattggaactgggatacagtccaggcgcctgcgggaggaagcgggaaggaatattggggaatgggggagacactgacccagcgacgcggcgtgagagaagaaatcactcgggatgtaaagctctgttaggcgggaagaaggaagtgacggtaccgcacgaggaagccacggcaaactacgtgccagcagccgcgg

SEQ ID NO: 4968 - DNA, 486 bp, Unknown
  Ascusbbf_1446124, encodes 16S rRNA
agagtttgatcatggctcagaacgaacgctggcggcaggtcttaggcatgcaagtcgaacggacgacagagtggcttgccattctgaagttagtggcgcacgagtgagtaacgcgtgggaaactgcccttcactggggaataacgtctggaaacggacgctaataccgcatccgcccgccagtggcaagatttatctgtaagggctgttcccgcgttggattagctttgcgtgggggtaatggcctaccaaggcgcttatccatatcttgtctgcgaggacgatccgccacgctggaactgagacacggtccagacgcctacgggaggcagcagctaagaatattgggcaagggaggaaactctgacccagccatgccgcgtgaatgaagaaggccttcgggttgtaaagttcttttagtcatgaagatgatgacagtagtgacagaaaaagcaccggctaacttcgtgccagcagccgcggtaat

SEQ ID NO: 4969 - DNA, 490 bp, Unknown
  Ascusbbf_1347141, encodes 16S rRNA
agagtttgatcctggctcaggatgaacgctagctacaggcttaacacatgcaagtcgcggggcatcatggcatgtagcaatacatgctgatggcgaccggcggatgggtgagtaacgcgtatccaacctggccctatctcgggtacagcccctcgaaagagggattaattcccgatgttccctgggatccgcatgttttccagggcaaaggcatttgtcggatagggatggggatgcgttccattaggcagacggcggggtaacggcccacggagcctacgagggataggggttctgagaggaagggcaccaaagctgggagtgagacacggcacggactcctacggcaggcagcagtgaggaatattggtgaatggcggtaacgctgaaccagcaaagtagcgtgagggagtacggccctatgggttttaaacctcttttgttagggagcaaccggtggcactagggccattctgcgagtacctttcga

SEQ ID NO: 4970 - DNA, 490 bp, Unknown
  Ascusbbf_1377172, encodes 16S rRNA
agagtttgatcctggctcaggacgaacgctggcggcatgcttaacacatgcaagtcgaacggacggattccgtcgggatgaaagttagtggcgaacgggggaggaatgtacgagcaacctgccgctggcaacgggagaacagggggaaacgacggctaatacggtataagaccacggcaccgcatggtgcggcggtaaaagatttttcggacagagatgggctcacatccctttagcgagttggtgagataatagcccaccaaggcgacgaggggtagccgagcggagaggctgatcggccacattgggactgaaacccggcccagactcctccgggaggccgcagtcgggaatagtgggccatggaggaaccgctgacccagcaatgccgcgtgcgcgaggaaggtacttttcttgtaaagctcttttctcaggaacgaataaagatgacggtacctgaggaataagccccggctaactacgcgccagc

SEQ ID NO: 4971 - DNA, 490 bp, Unknown
  Ascusbbf_1346990, encodes 16S rRNA
agagtttgatcctggctcaggacgaacgctggcggcatgcctaacacatgcaagtcgaacggagaggaggtcgggaatcttagtggcgaacgggtgaggaacgcgtaggcaacctgccctggaggtggggacaacatcccgaaaggggggcgaataccgaatgggagcgctttcccgcatgagagagcgaggaaagatggcctctatggataagctatcgctaaaggaagggcctgcgtctgcttagcgagttggtggggtaacggcctaccaaggcgatgatcagtagccggtctgagaggtggaacggcagaattgggcctgcgcaaaggccccgacgccgacgggagcccgcaaggggggctcttccggccttggcgcaagcctgacggcgcaaagccggctgagtgctgaaggaattcgttccgtaaagctcgtttgtttatgacgaatgtgcagactgtgaataatggtttgtaatgacggtagt

SEQ ID NO: 4972 - DNA, 490 bp, Unknown
  Ascusbbf_1323627, encodes 16S rRNA
agagtttgatcatggctcaggatgaacgctggcggcgtgcttaacacatgcaagtcgaacggagttatctcgctgaggagagctttctcaaatcttgagataacttcgtggcggacgggtgcgtaccgcgtggctaacctgccttatacttggggataacacttagaaataggtgctcataccgcataagcgcccgttcccgcatgggaaagtgtgaaaaactccggtggtgtaagctggatcctcgtctgattagatagtttgtgcggtaacggcccaccaagtcaacgatcagtagccggactgtaggggtgaacggcaacagtgggactgagaaacggcccaaactcctacgggaggcagcagtggggaagagtgcaaaatgggggaaacccggatgcagcgacgccgcgtgagggaagaagtatgtcggtagggaaagctagatcagcaaggaagaaaaaaatgacggtacttgactaagaagccc

SEQ ID NO: 4973 - DNA, 490 bp, Unknown
  Ascusbbf_1377181, encodes 16S rRNA
agagtttgatcctggctcaggataaacgctggcggcgcacataagacatgcaagtcgaacggactcaacgcattcgtaacgattgagagcggttaggggcggacgggggaggaatgcataagtaacctgcctatcagaggggaaccacagctggaaacgactgctaataccgcatacgccccgatcatcacatggttcaagtgggaacggaccaatccgctaatagatggacttagatctgattgtctagttggtggggtaacggcctaccaaggcgacgatcagtagccggactgcgagggtaaacggccgaaatgggactgagatacggcccagactccgaagggaggcagcagtcgggaatagtgcgcaatggaggaaactctgacgcagtgacgccgcgtgcaggaagaaggttttcggattgtaaacggctttagacagggaagaaaaaagacggtaccgggagaataagctccggctaactacg

SEQ ID NO: 4974 - DNA, 490 bp, Unknown
  Ascusbbf_1323525, encodes 16S rRNA
agagtttgatcctggctcaggatgaacgctagcgataggcctaacacatgcaagtcgaggggcagcacatgacgtagcaatacagatggtggcgaccggcgcacgggtgagtaacacgtatgcaacctaccttcaacaggggaataacccgtcgaaagacggactaataccccataatacagggctccctcatgggaatatttgttaaagatttatcggttgaagatgggcatgcgttccattagctagttggtgaggtaacggctcaccaaggcaacgatggataggggaactgagaggtcgaacgcacacactgggaatgagacacagaacggactactacgggacgaggcagggaggaatattggtgaagggaggcagcgttgaacaagccatgtcgcatgaaggatgacggctctacgggttgtaaacttcttttttaagggaataaagttaggtacgtgtagctatttgcatgtaccttacgaat

SEQ ID NO: 4975 - DNA, 490 bp, Unknown
  Ascusbbf_1323696, encodes 16S rRNA
agagtttgatcatggctcaggacgaacgctggcggcatgcttaacacatgcaagtcgaacggacggattccgtcgggatgaaagttagtggcgaacgggggaggaatgtatgagcaacctgccgcggtcaacgggagaacagtgggaaacgacggcgaatacagtagaagaccacggcaccgcatggtgcggcggtaaaagatgtgtcggacagagaggggcgcagaccccattagctagttggtgagataatagcccaccaaggcgacgaggggtagccgagctgagagacggatcggcccccttgggactgcaccacggcccagactcctacgggcggccgcagtggggactattgggcaatggcggaaactctgaccccgcactgccgcgtgcgcgatgaaggtccttttcttgtccagctcttttctcaggaacgcataaagatgacggtacctgaggaataagccccggctaactacgtgccagc

SEQ ID NO: 4976 - DNA, 485 bp, Unknown
  Ascusbbf_1378078, encodes 16S rRNA
agagtttgatcctggctcagaacgaacgctggcggcaggtcttaggcatgcaagtcgaacggacgacagagtggcttgccattctgaagttagtggcgcacgagtgagtaacgcgtgggaaactgcccttcactgggaataacgtctggaaccggacgctaatcccgcctacgcccgcaaggggaaagatttatcggttttggatttgcccgctttggattatcttgttggtggggtaattgcctaccaatgcgatgatccatatctggtcgtagaggacgatcagccacgcgggaactgagaaacggtccagacgcctacgggaggcagcagctaagaatattgggcaatggaggaaactctgacccagccatgccgcgtgaatgaagaaggccttcgggttgtaaagttcttttagtcatgaagatgatgacagtagtgacagaaaaagcaccagctaacttcgtgccagcagccgcggtaat

SEQ ID NO: 4977 - DNA, 490 bp, Unknown
  Ascusbbf_1323700, encodes 16S rRNA
agagtttgatcctggctcaggacgaacgctggcggcgtgcttcatacatgcaagtcgaacgagaagctctagcttgctagagtggaaagtggcggacgggtgagtaatatgtaggaaatctgccctagtgagggggacaacagagagaaacttctgctaataccccatatgagcttggttgcaataccaatcttgaaaactccgttgctctaggatgagccttcatctaattcgcttgttggtggtgtaatggactaccaaggcgacgatcagtagctggtttgagaggatgatcagccaaaaggggaatgggacacggcccatactcctacgggaggcagcagtagggaatgttgcgaaatgggcgaaagcctgacgcagcaacgccgcgtgaatgatgaagcccttcggggtgtaaaattctgtcagtggggacgaattttgacggtacccacagaggaagcaccggctaactccgtgccagcagccg

SEQ ID NO: 4978 - DNA, 490 bp, Unknown
  Ascusbbf_1323725, encodes 16S rRNA
agagtttgatcatggctcaggatgaacgctagcggcaggcttaacacatgcaagtcgtacggcagcgcggggtagcaagactctgtcggcgaccgtcggaggggggcgtaacacgtgagcaactttcccggcactggggggtaggcgctggaaacgttgtgtaataccccctaatatatggactcacatggattcatattgaaagattcgttggtgacggatgggctcgcgtaacattagctagtcggcggggtaacggcccaccgaggcgacgatgtttggggggtctgagaggaaggtaccatagaatggaagtaaggaacgaaccagactcgtacgggaggaaggagggaggaagcttggtgaatgggacgaagcctcaaccagccatgctgcgtgcaggaataaggcccgatgggtcgtaaactgcttttcgtggagggcaatacgtgtaacgaggggtcagatgagagtatcaggggaataagca

SEQ ID NO: 4979 - DNA, 490 bp, Unknown
  Ascusbbf_1378048, encodes 16S rRNA
agagtttgatcctggctcaggatgaacgctagctacgggcttaacacatgcaagtcgaggggcagcataacgaaagcttgcttttgtttatggcgcccggcgcacgggtgagtaacgcgtatccaaccttccccttagtatggcatagcccggcgcaagtcggattaataccctatgttttccgttgaggacatctcaaatgggacgaagagttatcgctaagggatgtgggggcgtctgatttggttgtgtgcggggtaacggccccccacaccatcgatcagtagggggtctgagaggaaggtaccccacattggaactgagacacggaccaaactcctacgggaggcagcagtgaggaatattggtcaatgggcgagagcctgaaccagccaagtagcgtgcaggatgacggccctatgggttgtaaactgcttttgcatgggaataaagtgagggacgtgtccctttttgtgtgtaccatgagaat

SEQ ID NO: 4980 - DNA, 488 bp, Unknown
  Ascusbbf_1342112, encodes 16S rRNA
agagtttgatcctggctcagaacgaacgctggcggcaggcttaacacatgcaagttgagcgggattgattgatagcttgctattgatcatgagagcagcgcactggtgagtaacacgtgggaacataccttttggtgggggacaacagttggaaacgactgctaataccgcataagccctgagggggaaagattaattgccgagagattggcccgcggaagattaggtagtaggtggggtaacggcctacctagccgacgatctatagctggtgtgagaggacgagcagccacattggaactgagacacggtccagactcctacgggaggcagcagtgaggaatattgggcgagggagagaacgctgacccagccaggccgcgagagagaaggaggttgtcgtattgtaaagctctttcaggcgagaagatgatgacggtaccgtcagaggaagcaccggctaactacgtgccagcagccgcggtaat

SEQ ID NO: 4981 - DNA, 490 bp, Unknown
  Ascusbbf_1323690, encodes 16S rRNA
agagtttgatcctggctcaggatgaacgctagctacaggcttaacacatgcaagtcgaggggcagcataacgaaagcttgcttttgttgatggcgaccggcgcacgggtgagtaacgcgtatccaaccttccccttagtagggcctagcccggcgaaagtcggattaatactctttgttttccgttgcggacatctgaggtggaatatagatttatcgctaagggttggggatgcgtgtgattcggtggttggcggggtttcggcccaccaagccatcgatcagtaggggttctgagagggaggtgccacacgttggagcatagagacggaccaaagtcctacgggaggacgaagtgcggaagattggtcaatgggcgagagcctgagccagccaagtagcgtgcaggatgccggccctatggattgtaaactgcttttgcatgggaataaagtgagagacgtgtccctttttgtatggaccatgggaat

SEQ ID NO: 4982 - DNA, 490 bp, Unknown
  Ascusbbf_1378006, encodes 16S rRNA
agagtttgatcctggctcaggatgaacgctagcggcaggcttaacacatgcaagtcgaggggcagcgcggtgtagcaatactctggcggcgaccggccgaagggcgcgtaacgcgtgagcaacttgcccgtcactgggggatgggcactggaaacggtgtgtgatactcaataacatttggattcacatggcttcatattgaaagattagttggtgaccgatgggctcgcgtaacattagctagtcggcgtggtaagggcccaacggggctacgatgtgtaggggttctgagaggaaggtcccccacactggaactgagacacggtccagactcctacgggaggcagcagtgaggaatattggtcaatgggcgaaagcctgaaccagccaagccgcgtgcaggaataaggccctatgggtcgtaaactgcttttccttgaggacaataagggtcacgtgtggcccgatgagggtatcagatgaataagga

SEQ ID NO: 4983 - DNA, 490 bp, Unknown
  Ascusbbf_1378005, encodes 16S rRNA
agagtttgatcctggctcaggataaacgctggcggcgcacataagacatgcaagtcgaacggacttaactcattcttaacgattgagagcggttagtggcggactggtgagtaatgtataagtaacctgcctatcagaggggaacaacagttggaaacgactgctaataccgcatatgccacgagaatcacatggtccaagtgggaaaggagcaatccgctgatagatggacgtatatctgatcagctggttggtggggtaacggcctaccaaggcgacgatcagtagccggactgagaggtttaacgggcacaatgggaatgggatacgggccagactcctaagggaggcagcaggtgggaataattcgaaatggaggaaaacctgacgcagtgacgccgcgggcaggaagaaggttttcggattgtaaactgctttagacagggaagaaaaaagacagtacctgtagaagaagctccggctaactacg

SEQ ID NO: 4984 - DNA, 490 bp, Unknown
  Ascusbbf_1377991, encodes 16S rRNA
agagtttgatcctggctcaggatgaacgctggcggcgtgcctaatacatgcaagtcgaacgaggtttctcttcggggaaacctagtgtcgaacgggtgagtaacacataggtaatctacctttcagaatgggatacccaagagaaattttggctaataccgtatacaatcatttctccgcatgtagatttgatgaaagtggctccaaagcctcgctgttagatgaacctgtgacacattatctagttggtgaggtaacaacccaccaaggcgaagatgtgtagctgatctgagaggataatcgggcacaatggtactgcacaacggaccatactccaacgggaggaagcagtagggagttttcggaaatgggggaaaccctgaccgagaaacgccgagtgatttagaaggccctctgggtcgtaagaatctgttgtaaaggagaaatggtagtgggaggaaatgcccattatttgatagtactttattag

SEQ ID NO: 4985 - DNA, 490 bp, Unknown
  Ascusbbf_1342025, encodes 16S rRNA
agagtttgacatggctcaggatgaacgctagcgataggcctaacacatgcaagtcgaggggcagcacatgaagtagcaatacagatggtggcgaccggcgcacgggtgagtaacgcgtatgcaacctacctacaacaggggaataactcgttgaaagacggactaataccccataatacagggatcccgcatgggaatatttgttaaagatttatcggttgtagacgggcatgcgttccattagctagttggtgaggtaacggctcaccaaggcaacgatggataggggaactgagaggtttatcccccacactgggaacggggaacggaccagactcctacgggaggcagcaggggggaaaaattgccaatggacgcaggtctgaaccagcccagtcgcgtgaaggaagaaggccctacgggttgtaaacttcttttgtaagggaataaagtgagccaagtgtggctttttgcatgtaccttacgaata

SEQ ID NO: 4986 - DNA, 490 bp, Unknown
  Ascusbbf_1342039, encodes 16S rRNA
agagtttgatcctggctcaggacgaacgctggcggcgtgcttcatacatgcaagtcgaacgggaagctgacttcggtctgtggatagtggcggacgggtgagtaatatgtaggtaatctgcctcagagagggggacaactgggggaaactcttgcttatacaccatatgagcttggctgcaatgccaatctttagaactccggtgctctgcgatgagccggaatctgattggcttgttggcggtttgatggaccaccaagtcgacgatcagtagctggttacagaggaggaacagccacaatgggaccgagacaacgcccaaactccaacgggaggcagcagtagggaattatgcgcaatgggcgaaagcctgacgcagcaacgccgcgtgtgagatgacacccttcgggatggaaaacactgtcagtagagacgaaacttgacggtacctacagaggaagcaccggctaactccgtgccagcagccgcg

SEQ ID NO: 4987 - DNA, 490 bp, Unknown
  Ascusbbf_1323777, encodes 16S rRNA
agagtttgatcctggctcgggatgaacgctggcggcgtgcttaacacatgcaagtcgaacggagttatctcgctgaggagagcttgctcaaatcttgcgataacttagtggcggacgggtgagtaacgcgtggatcacctgccttataccgggggataacacttagaaataggtgctaatcccgcataagcgcccgatcccgcatgggaaagtgtgaaaaactccggtggtataagatgactccgcgtctgattagctagttggtgaggtaacgtccaaccaagtcaacgatcaatagccggcctgagagggtgaacggcaacattgggactgagacacggcccaaacgcctacgggaggcagcagtggggaatattgcacaatgggggaaaccctgaggcagcgacgccgcgtgagtgaagaagtatttcggtatggaaagctctatcagcaaggaagaaaaaatgacggtacttgactaagaagcccc

SEQ ID NO: 4988 - DNA, 490 bp, Unknown
  Ascusbbf_1342036, encodes 16S rRNA
agagtttgatcatggctcagagcgaacgctggcggcaggcctaacacatgcaagtcgagcgcccgtagcaatacgggcgcggcagacgggagagtaacacgtgggaccgtacccttcagttcggaataacccggggaaactcggactaataccgaatacgtccgtaaggagaaagatttatcgctgaaggatcggcccgcgtctgattagctagttggtggggtaatggctcaccaaggcgacgatcagtagctgttctgagaggaaggccccccacactgggactgagacacggcccagactcctacgggaggcagcagtgaggaatattggtcaatggcggtaacgctgaaccagccaagtagcgtgagggattacggccctatgggttttaaacctcttttgttagggagcaacctatggcactagtgccatactgcgagtacctttcgaataagcatcggctaactccgtgccagcagccgcggta

SEQ ID NO: 4989 - DNA, 490 bp, Unknown
  Ascusbbf_1445236, encodes 16S rRNA
agagtttgatcatggctcagagcgaacgctggcggcaggcctaacacatgcaagtcgagcgcccgtagcaatacgggagcggcagacgggagagtaacacgtgggaacgtacccttcagttcggaataacccggggaaactcggactaataccgaatacgtccgtaaggagaaagatttatcgctgaaggatcggcccgcgtctgattagctagttggtggggtaatggctcaccaaggcgacgatcagtagctgttctgagaggaaggccccccacactgggactgagacacggcccagactcctacgggaggcagcagtgggaaatatgggtcaatggcggtaaggctgaaccggccaggaggcgtgagggattacggccctaggggttttaaacctcttttgttagggagcaacctagggaactagggcaatactggaagtacctttcgaatagcatcggctaactccgtgccagcagccgcggtaa

SEQ ID NO: 4990 - DNA, 490 bp, Unknown
  Ascusbbf_1378051, encodes 16S rRNA
agagtttgatcctggctcaggatgaacgctagctacaggcttaacacatgcaagtcgaggggcagcataacgaaagcttgcttttgttgatggcgaccggcgcacgggtgagtaacgcgtatccaaccttccccttagtagggcatagcccggcgaaagtcggattaataccctatgttttccgttgaggacatctgaagtggaacaaagatttatcgctaagggatgaggctcgtctgattagggtgttggcggggtaacggcccaccaagccatcgatcagtaggggttcttagaggaggtgctcacacatcgggattgggaaacggaccaaactccaacgggaggaagcagtgaggaatagtggtcaatgggcgagagcctgaaccagccaagtagcgtgcaggatgacggccctatgggttgtaaactgcttttgcatgggaataaagtgagggacgtgtccctttttgtatgtaccatgagaata

SEQ ID NO: 4991 - DNA, 490 bp, Unknown
  Ascusbbf_1377971, encodes 16S rRNA
agagtttgatcctggctcagaatgaacgttggcggcgtggattaggcatgcgagtcgtgcgggtgtagcaatacaccagcggcgaaagagacagtaatgtatagattatctgccctcaggacgggaatagcggcgggaaactgccggtaatgcccgataatgtctccggatcaaaggtgtgagtccgcctggggatgagtctatatcctattagctagttggtaaggtaacggcttaccaaggctgtgatgggtagcgggtgtgagagcaggacgcgcgtcattgggactgagacactgcacagaccccgacgggtggctgcagtcgagaatcttcggcaagggacgcaagtcggaccgagcgacgccgcgtgcgggaggaaggccttcgggttgtaaaccgctgtcagtggggaggaaggcttcgtgaagagcgaagtttgacctatccgcagaggaagtgagggctaagctcgtgccagcagccgcgg

SEQ ID NO: 4992 - DNA, 422 bp, Unknown
  Ascusbbf_1377977, encodes 16S rRNA
agagtttgatcctggctcaggatgaacgctagctacaggcttaacacatgcaagtcgaggggcagcatgtatctggcttgctagctatgatggcgaccggcgcacgggtgcgtaacgcgtatccaacctgccgtttagccgggaacagcccggcgaaagcgagattactacccgatgttgtgcgtagtccgcatggcaggcgcaccacaaggtttaccggtaagcgcccgggatgcgtacgagtagttggtgggaggggtagcggccaccaggcgcaacgcgggtcgggccaagtagcgggcaagacgactgccttacagattgtaaacggcttttatgcgggggtaaagtgtccaactgggggaatagtgctaataccgcatgaaaaaggacggacaaaccccgcgcgacgccgcggtaat

SEQ ID NO: 4993 - DNA, 490 bp, Unknown
  Ascusbbf_1445377, encodes 16S rRNA
agagtttgatcctggctcaggataaacgctggcggcgcacataagacatgcaagtcgaacgaacttattcgaaagtttactttttaagcgtttagtggcggactggtgagtaacgcgtaagcaatctgcctatcatagtagaataacagtgagaaatcattgctattaccgcatatgctgttagtctctcatgatacaaatagaaaagaagcaatccgctgagagatgagcttgcgtctgattagttagtgggtggaataacggcctaccaagacgatgatcagtagcgggactgagaggttagacggccacattgggactgagcgacggcccagagtcagacgggaggcagcaggcgggaatattgcgcaatggaggaaactctgacgcagggatgccgcgtgcaggaagaagggtttcggagtgtaaactgctttagatagggaagaaaaaatgacggtacctatagaataaggtccggctaactacg

SEQ ID NO: 4994 - DNA, 490 bp, Unknown
  Ascusbbf_1377966, encodes 16S rRNA
agagtttgatcctggctcaggatgaacgctagctacaggcttaacacatgcaagtcgaggggcagcataacgaaagcttgcttttgttgatggcgaccggcgcacgggtgagtaacgcgtatccaaccttccccttagtagggcatagcccggcgaacgtcggattaataccctatgttttccgttgaggacatctgaagtggaacaaagatttatcgctaagggatgtggatgctgcttattaggtttgttgcggggtaacggcccaccaagccgtctatcagtatgggttctgagagcacgatcacgcacatgaggacgtggaaacggaccacactcctacgggaggccgcagtgaggaatattggtacatgggcgagagcctgaaccagccaagtagcgtgcaggatgacggccctatgggttgtaaactgcgtttgcatgggaataaagtgagggacgtgtccctttttgtatgtaccatgagaat

SEQ ID NO: 4995 - DNA, 490 bp, Unknown
  Ascusbbf_1377897, encodes 16S rRNA
agagtttgatcctggctcaggatgaacgctagcgataggcctaacacatgcaagtcgaggggcagcacatagagtagcaatacttttggtggcgaccggcggatgggtgagtaacacgtatgcaacctaccttctacagtggaataacccgttgaaagacggactaatgccgcataacacaggggctccgcatggagatatttgttaaagattcatcggtagaagatgggcatgcgtatgattagctagttggtaaggtaacggcttaccaaggcaacggtcattaggggttctgagaggaaggtcagccacactggtacagagacacggaccagactcctacaggaggcagcagcgaggaatagtggtcaatgggcgagagcgtgaaccagccaagttgcgtgaagggagactgtccgatggagtgtaaacttcttgtgtcagagactaaagttaaccacgtgtggttttttgcatgtacctgacgaat

SEQ ID NO: 4996 - DNA, 490 bp, Unknown
  Ascusbbf_1341908, encodes 16S rRNA
agagtttgatcctggctcaggatgaacgctggcggcgtgcttaacacatgcaagtcgaacggagttatctcgctgaggagagcttgctcaagtcttgagataacttagtggcggacgggtgagtaacgcgtggataacctgccttataccgggggataacacgtagaaataggtgccaataccgcataagcgcacgatcccgcatgggagagtgtgaaaaactccggtgagataagatggatccgcgtctgagtggatagttggtgaggtaagggcccaccaagtcaacgatcagtggccgcctggggaggatgaaaggccagatcggaactgcgacacggcccaaaatcctactgtaggcagcagtggggaatattgcaaaatgggggaaaccctgatgcagcgacgccgcgtgagtgaagaagtatttcggtatgtaaagctctatcagcaaggaagaaaaaaatgacggtacttgactaagaagccc

SEQ ID NO: 4997 - DNA, 490 bp, Unknown
  Ascusbbf_1445402, encodes 16S rRNA
agagtttgatcctggctcaggatgaacgctagcggcaggcttaacacatgcaagtcgaggggtaacgcggtgtagcactactcttgcgacgaccggcgcacgggtgcgtaacgcgtatgcaacctacctgtaccaggggtataacggagagcaatttccactaatcccccatcttgttattctttcgcatgttcggataacgaacgcttcggtggttacggatgggcatgcgtgccattagctagttggtaaggtaacggcttaccaaggcgacgatgtctaggggagctgggcggcttatcgccaacacgggtactgagaaacggaccagactcctacgggaggcagcagtgaggaattgtggtcaatggacggaaggctgaaccagccatgccgcgtggaggaagaaggtcctatgggttgtaaactccttttgtgcgggagtaataagggcgatgcgaagcccgatgagagtatcggacgaataagc

SEQ ID NO: 4998 - DNA, 490 bp, Unknown
  Ascusbbf_1323905, encodes 16S rRNA
agagtttgatcctggctcaggatgaacgctagctacaggcttaacacatgcaagtcgaggggcagcataacgaaagcttgcttttgttgatggcgaccggcgcacgggtgagtaacgcgtatccaaccttccccttagtagggcatagcccggcgaaagtcggattaataccctatgttttccgttgtggacatctgaagtggaacaaagctttatcgctaagggatggagatgggtctgattaggttgttggcggggtcacggcccaccaagccatcgatcagtaggggttctgagaggaaggacccccacgttggtcatgagaaacgacacaaactcctacggaaggcagcagtggtgaagattggtagatgggcgggagcctgaaccagccaagtagcgtgcaggatgacggccctatggattgtaaactgcttttgcatgggaataaagtgagggacgtgaccctttttgtatgtaccatgagaat

SEQ ID NO: 4999 - DNA, 490 bp, Unknown
  Ascusbbf_1347197, encodes 16S rRNA
agagtttgatcctggctcaggataaacgctggcggcgtacataagacatgccagtcgaacggtctcatctcattcttttcgtttttttgctgtcagcggcggactggtgagtaatgctttatcaaccttcctatctgcggggacccacagttggaaacgactgcttataccgcatatgcctcgagaatcacatggttcaagtgggaaaggagccatccgctgatagatggacttatatctgattagctagttggtggggtaacggcctaccaaggcgacgatcagtagccggcctgagcggttaaccggcgaccttggtactgggatccggcccgggctcctacgggaggcagcagtcgggaatattgcgcaatggaggaaactctgacgcagtgacgccgcgtgcaggaagaaggttttcggattgtaaactgctttagacagggaagaaaaacgacagtacctgtagaataagctccggctaactacg

SEQ ID NO: 5000 - DNA, 490 bp, Unknown
  Ascusbbf_1347196, encodes 16S rRNA
agagtttgatcctggctcaggacgaacgctggcggcatgcctaacacatgcaagtcgaacggaggcggaaacaccttagtgtcgtactggtgagtaacgcgtgagtaacctgccttatacacagggattccagttagaaatgactgctaataccggataagaccacagtccggcatcggacaggggtcaaagtgaattagcggtataagatggtctcgcgtccaattagctagttggtggggtaatggcccaccaaggcaacgattggtagccgacccgagagggtgatcggccacatgggaactgggccccgatccaaactcctgcgggcggccgcagtggggaatattgggcaatggaggaaactcttgcccagcaatgccgcgtgggtgatgaaggtcttatggattgtaaaactctttgattagggacgaacaaatgacggtacctaaagaacaagccccggctaactatgtgccagcagccgcgg

SEQ ID NO: 5001 - DNA, 490 bp, Unknown
  Ascusbbf_1445880, encodes 16S rRNA
agagtttgatcctggctcaggatgaacgctagctacatgcttaacacatgcaagtcgaggggcggcattggattagcttgctaatcctgatggcgaccggcgcacgggtgagtaacgcgtgtccaaccttccctatagtagcggatagcccggcgaaagtcggattaatacgctatgttgtatttagaggacatctgaagaataccaaaggtttacctctataggatggggatgcgtctggttaggttgttggcgggggaacggcccgccaagccatcgatcagtagggggtctgagagggaaggtccccaccatgggaactgggcaacggtcaaaccccctacggagggaggcagtggggaatatgggtaaatgggcaggagctggaaccggcaaagtagcgtgcaggataacggccttatgggttgtaacctgcttttatcgggggttaaggtgcgggacgcgtgccgtttggtaggaacccgatgaa

SEQ ID NO: 5002 - DNA, 486 bp, Unknown
  Ascusbbf_1324298, encodes 16S rRNA
agagtttgatcatggctcagaacgaacgctggcggcaggtcttaggcatgcaagtcgaacggacgacagagtggcttgccattctgaagttagtggcgcacgagtgagtaacgcgtgggaaactgcccttcgctggggaataacgtctggaaacggacgctaataccgcatccgcccgcaaggggaaaggtttatcggtgttggaagtgcccgggttggtttagcttgtggttggggtaatggcctacaaaggcgatgtgccttagctggtctgggaggacgatcagccacgctggaactgagacacggtccagactcctacgggaggcagcagctaagaatattgggcaatggaggaaactctgacccagccatgccgcgtgaatgaagaaggccttcgggttgtaaagttcttttagtcatgaagatgatgacagtagtgacagaagaggcaccggctaacttcgtgccagcagccgcggtaat

SEQ ID NO: 5003 - DNA, 490 bp, Unknown
  Ascusbbf_1445866, encodes 16S rRNA
agagtttgatcctggctcaggataaacgctggcggcgcacataagacatgcaagtcgaacggacttaactcattctttacgattgatagcggttagtggcggactggttagtaatgtataagtaacctgcctatcagatgggaacaacagttggaaacgactgctaataccgcatatgcctcgagaatcacatggttcaagtgggaaaggagcaatccgctgatagagggactaatatctgattagctagttggtggggtaacggcctaccaaggcgacgatcagtagccggactgaggggttaaacggccacactgggaccgagataaggcccagactacgaagagaggcagcagtcgggaagagtgagcaatggaggaaacgctgacgcagagacgccgcgggcaggaagaaggttttcggattgtaaactgctttagaaagggaagaaaaaagacagtacctgtagaataagctccggctaactacg

SEQ ID NO: 5004 - DNA, 490 bp, Unknown
  Ascusbbf_1377470, encodes 16S rRNA
agagtttgatcctggctcagaacgaacgctggtggcgtgtcttatacatgcaagtcgagcggtccagcaatggatagcggcgaacgggtgagtaacgcgtaagcaatctgccccctgctcgggaatagccgtgccaacgcgcggataataccggatatcgtggggccctgcatagggccttgacaaaagatttatcggcaggggatgcgcttgcgtccgattagctggttggcggggcaacggcccaccaaggcgacggtcggtagccggcctgagagggtgatcggccacagtgggaccgggacacggcccagacgcctaagggaggcagcagtagggaatattgcacaaggggggaaaccctgatgcagcaacgccacgtgtgggaagaagcatttcggtgtgtaaaccacggtcgtgagggaataaggctaattttcggattagttgaatgtacctcgagaggaagcaccggcaaacttcgtgccag

SEQ ID NO: 5005 - DNA, 490 bp, Unknown
  Ascusbbf_1445847, encodes 16S rRNA
agagtttgatcctggctcaggatgaacgctagcgacaggcttaacacatgcaagtcgaggggcagcatggaggtagcaatacttctgatggcgaccggcgcactggtgagtaactcgcatgcaaccttcctctgcttgggtgataacccgcggaaccgcggcctaataccctgtatgcactgctgcctcctgatgtccgtgtgatagatcttcgtcctggcatgggcatgcggcgcattcgctgtttgtcgtttcaacggcccaccaaggccacgatgcgtaggggttctgagaggaaggtacacaaaactggtaatgagacacggaccagactccgacgggaggaagaagtgaggaatattggtcaatgggaggaagcctgaaccagccaagtcgagtgagggatgacggcccgacgggttgtaaaccgcttttgccggggagtaacgcgatccacgtgaggggcgctgagagtacccgatgaataagc

SEQ ID NO: 5006 - DNA, 490 bp, Unknown
  Ascusbbf_1324346, encodes 16S rRNA
agagtttgatcctggctcaggatgaacgctagcggcaggcttaacacatgcaagtcgaggggtaacgcggggtagcaatactctggcgacgaccggcgcacgggtgcgtaacgcgtatgcaacctacctgtaacaggggtataacggagagaaatttccactaatcccccatattgttagagattcgcatgtttctctaacgaaagcttcgttggttacggatgggcatgcgtgacattagagagtgggtaaggtaacggcttaccaaggcgacgatgtctaggggagctgagaggcttatgccacacacgggtactgagacacggaagagactcatacgggggggaacagtgaggaatagtggtaaagggacggaagtctgaaccagccatgccgcgtgaatgaagaaggccttcgggttgtaaagttcttttagtcatgaagatgatgacagtagtgacagaaaaagcaccggctaacttcgtgccag

SEQ ID NO: 5007 - DNA, 369 bp, Unknown
  Ascusbbf_1377393, encodes 16S rRNA
agagtttgatcatggctcaggatgaacgctagcggcaggcttaacacatgcaagtcgaggggtaacgcggggtagcaatactctggcgacgaccggcgcacgggtgcgtaacgcgtatgcaacctacctgtaacaggggtataacggcgcgaaatttccactaatcccccatattgttattctttcggatgttaggataacgaaagcttcggtggttacggatgtgcatgcgtgacattagctgggtggtaagatagtcctttgggttggaaacgacttttgttggagagtaataagggctttgcgaagcccgatgagagtatcggacgaataagcatcggctaactccgtgccagcagccgcggtaat

SEQ ID NO: 5008 - DNA, 490 bp, Unknown
  Ascusbbf_1377398, encodes 16S rRNA
agagtttgatcctggctcaggataaacgctggcggcgcacataagacatgcaagtcgaacgaacttattcgaaagtttacttttgcagcggttagtggcggactggtgagtaacgcgttagcaatctgcctatcagaggggagtcaacgtgagaaatcattgctaataccgcataagctctgagtatcgcatgatacaaatagatacggagcaatccgacgatagataagcttccgtctgatttgctagttggtgggttaacggcctaccaagacgatgttcagtagccggactgagaggtgaaaaggccacagttgggctgggatacggccccgaatcctacgaggggaaacagtcgggaaaattgcgcaatggaggaaactctgacgcagtgacgccgcgtgcaggaagaagggtttcggagtgtaaactgctttagagagggaagaaaaaaatgacggtacctatagaataagctccggctaactac

SEQ ID NO: 5009 - DNA, 490 bp, Unknown
  Ascusbbf_1324382, encodes 16S rRNA
agagtttgatcctggctcaggatgaacgctagctacaggcttaacacatgcaagtcgcggggcatcatggcatgtagcaatacatgctgatggcgaccggcggatgggtgagtaacgcgtatccaacctggccctatctcgggtacagcccctcgaaagagggattaatccccgatgttccctgggatccgcatgttttccagggcaaaggcatttgtcggataggtatgggtatgcgttccattcgccagtgtgcggggtacgggccccccgagccgacgatggatagggggtctgagaggaaggcacaccaaactgggacggagacacggcccagactcctacgggaggcagcagtgaggaatagtggtcaatggcggtaacgctgaaccagccaagtagcgtgagggattacggccctatgggttgtaaacctcttttgtgagggagcaaccggtggcacgagtgccagtctgcgagtaccgttcga

SEQ ID NO: 5010 - DNA, 490 bp, Unknown
  Ascusbbf_1324388, encodes 16S rRNA
agagtttgatcatggtcaggatcaacgctggcggcgtgcctaatgcatgcaagtcgaacggggtgtccttcgggtcacttccttggctgacgtgtgaggcacacatgggcaacctgccttatggagggggataaccgctggaaacagtgggtaataccgcataatcctggatctcgagtgggagatatagggaaagtcgcaagacgccgacagagtggcctgcgtccgattagctgtacggtgtggtaactgcctaccttggcagtgatcggtagctggtttgagaggattatcagccacacggggcctgagacacggccccgactcatacgggaggcagcagaaaggaattttccgcaatgggcgaaagcctgacggagcaacgccgcgtgtgggatgacgcttttcggagtgtaaaccactgttcgtggggacgaagcactgacggtacccacggaggaaggcccggctaactacgtgccagcagccg

SEQ ID NO: 5011 - DNA, 490 bp, Unknown
  Ascusbbf_1347224, encodes 16S rRNA
agagtttgatcctggctcaggatgaacgctagcgacaggcctaacacatgcaagtcgaggggcagcgcgggagaagcttgcttttcctggcggcgaccggcgcacgggtgcgtaacaggtgtgcaatctgtccatagtcggggaatagcccagcgaaagttggattaatgctccatgtgtcacgaagccgcatgactttgtgatgaaacgtaaggactatgggtgagcacgcttctgattagatagttggtgaggtaacggctcaccaagtcgacgatcagtaggggttctgagaggaagggcccacacattggaaaggacacacgggacaaacacacacgggggaaacaaggtggagaaagggggaaagggggaggggcaaagaaccacaagggtgggtagagggataaggttataggggattaaaatctttttggcccgggggaaaaaacgggccagttgtgctttctgaaaatttaggaaaaataaa

SEQ ID NO: 5012 - DNA, 490 bp, Unknown
  Ascusbbf_1324294, encodes 16S rRNA
agagtttgatcctggctcaggataaacgctggcggcgcacataagacatgcaagtcgaacggacttaactcattctttacgattcatagcgggtagtcgcggaatgggtagtaatgtagtagtaaccttcctatcagagaggaacaacagttggaaacgactgctaataccgcttattccacgcgaatcacatggttaaagagggaaaggagcaatccgcggatagatggattgataactgattggctagttgctggggtaacggcctccaaaggcgacgagaagtagccgtacgggggggttgagaggccaactagggtcctgcgtacggccgagactacgaagggaggaagaaggcgggaataatgagcaatggaagaagcgcggaggaagagacgccgcggggaggaagaaggttttcggattggaatatgctttagaaagggaagataaaagacagtacctgaagaataaggtccggctaactacg

SEQ ID NO: 5013 - DNA, 490 bp, Unknown
  Ascusbbf_1347249, encodes 16S rRNA
agagtttgatcctggctcaggatgaacgctagctacaggcttaacacatgcaagtcgaggggcagcggggggatagcttgctttctttgccggcgaccggcgcacgggtgtgtaacgcgtatccaaccttccccatactcgggaatagccctgcgaaagtcagattaatgcccgatggtcttagtatatgacatcatgctttaagtaaagattcatcgctatgggatggcgatgcgtctgtttaggaagtgggcggggtaacggcccaccaagtcgtcgatcagtaggggttctgagaggaaggtcccccacattggaactgagaaacggtccaaactcctacgggaggcagcagtgaggaatattggtcaatggtcgagagactgaaccagccaagtagcgtgaaggatgactgcccgatgggttgtaaactgcttttaggcggggataaagtgccgcacgcgtagggtattgcaggtaccgcgtgaat

SEQ ID NO: 5014 - DNA, 490 bp, Unknown
  Ascusbbf_1444509, encodes 16S rRNA
agagtttgatcctggctcaggacgaacgctagcgacaggcttaacacatgcaagtcgagcggcagcgcgggagaagcgtgctcttcctggcggcgcgcggcgcacgggcgcgctacaggggtgcaatctgtccatagtcggggaatagcccagcgaaagttggatgaatgctctatgcgtcactaagccgcctggctttgtgatgacacgtaaggactatgggtgagcacgcttctgactagacagttggtgaggtagaggctcaccaagtagacgatcagtaggggttctgagaggaaggtccccaacattggaactgagacacggtccaaaatcctacgggaggcagcagtgaggaatattggtcaatgggcgagagcctgaaccagccaagtagcgtgaaggatgaaggttctatggatgaaaaacttcttttgtccgaaagtaaaaaaggccacgtgtggcttcttgcaagtatcggacgaataag

SEQ ID NO: 5015 - DNA, 490 bp, Unknown
  Ascusbbf_1444618, encodes 16S rRNA
agagtttgatcctggctcaggatgaacgctagctccaggcttaacacatgcaagtcgaggggcagcaggacaatagcttgctattgtcgctggcgaccggcgcacgggtgagtaacgcgtatccaaccttccccttattagggcatagcccggcgaaagtcggcttaataccctatgttattcgtctcggacctctgaagttaatcaaagatttatcgctacgggatggggatgcgtctgtttaggttgttggcgtgttaacggcccaccaagccatctatcagtagtggttctgagaggaaggtccccaacattggaactgagacacggtccaaactcctacgggaggcagcagtgaggaatattggtcaatgggcgagagcctgaaccagccaagtcgcgtgaaggatgaaggtcctatggattgtaaactgcttttgtccgagggtaaaaaaggccacgtgtggcttcttgcaagtatcggacgaat

SEQ ID NO: 5016 - DNA, 490 bp, Unknown
  Ascusbbf_1444602, encodes 16S rRNA
agagtttgatcctggctcaggatgaacgctggcggcgtgcctaacacatgcaagtcgaacggaaaggattcttcggaattctttcattggcggccgggggagtaacgcgtgggtaacctgccccaaacagcggcacaacagctggaaacggcttctaataccgcataagcgcacagtgctgcatggtacagcgtgaaaagagtttatcggtatgggatggaccagggtcggattagacagatggggtggtaacggccctccaagccgacgaaaagtaggcgacctgggaggtggacgggcgacattgggactgagacacggaccaaacaccaacagggggcagcagtgggggatattgcacaacgagcgaaagcctgatgcagcgaccccgcgtgagtgaggaagtatttcggtaggtaaagctctagcagcagggaagaaaatgacggtacctgactaagaagccccggctaactacgtgccagcagcc

SEQ ID NO: 5017 - DNA, 490 bp, Unknown
  Ascusbbf_1324005, encodes 16S rRNA
agagtttgatcctggctcaggatgaacgctggcggcgtgcctaatacatgcaagtcgaacgagggtgcttgcaccctagtggcgaacgggtgagtaacacgtaggtaacctgccctttagcttgggatacccagaggaaactttggctaataccggataacaacagaagaggcatctcttcagtttgaaaggccctttacggggtcacttaaggatgcacctgcggcgcattagctagttggtgagataccagcccaccaaggcgaggatgcgtagcctacctgagagggtgatcggccacattggaactgggacacggtccaaaagcctacgggaggcagacgtcaggaggttacggcaatgggggaaaccctgaccgggcaacgccgcgagagtgatgacggccctatgggttgtaaagctctgttgtaagggacgaatgattcgcttaggaaatgaagcgggtttgacggtaccttaccagaaagca

SEQ ID NO: 5018 - DNA, 490 bp, Unknown
  Ascusbbf_1378700, encodes 16S rRNA
agagtttgatcctggctcaggatgaacgctagctacaggcttaacacatgcaagtcgaggggcagcataacgaaagcttgcttttgttgatggcgaccggcgcacgggtgagtaacgcttatccacccttccccttagtagggcatagcccggcgaacgtcggcttattcccctttgttttccgttgaggacatctgaagtggaacaaagatttatcgctacgggatggggctgcgtctgattaggttgttggcggggtaacggcccaccaagccatcgatcagtaggggttctgagaggaagtgcccacacattggtactgggaaacggaccaaacgccgacgggaggcagcagtgaggaatattgggcaatgggcgagagactgaaccagccaagtagcgtgaaggaggacggccctatgggttgtaaactgcttttgcaggggaataaagtgagggacgtgtgccggtttgtatgtaccatgagaat

SEQ ID NO: 5019 - DNA, 490 bp, Unknown
  Ascusbbf_1377496, encodes 16S rRNA
agagtttgatcctggctcaggatgaatgctagctacaggcttaacacatgcaagtcgaggggcagcataacgaaagcttgctttcgttgatggcgaccggcgcacgggtgagtaacgcgtatccaaccttccccttagtagggcatagcccggcgaacgcctgattaataccctctgttttccgttgaggacatctgaagtggcacaaagatttatccctaagggatggagatgcgtctgagtaggttgtgggcggggtaacggcccaccacgccagcgatcagtaggcgttctgaggggaaggtacccgtcatgggaactgagaaccggacaaaacacctacgggaggcagtagggaggaatattggtccaggggcgagggcctgaaccagccaagtagcgtgcaggatgacggccctatgggttgtaaactgcttttgcatgggaataaagtgagggacgtgtcactttttgtatgtaccatgagaat

SEQ ID NO: 5020 - DNA, 490 bp, Unknown
  Ascusbbf_1445862, encodes 16S rRNA
agagtttgatcctggctcaggacgaacgctggcggcgtgcttaacacatgcaagtcgaacggtaacgccccagcttgctggggtatacgagtggcgaacgggcgagtaacacgtgggtgacttgccccgcacctcgggataagcctgggaaactgggtctaataccggatagcactgtaccgtgagggtgtggtggaaagtttttcggtgtgggaggggcctgcggcctatcagcttgttggtggggtattggcctaccaaggcggcgccgggtagccggcctgagagggtggtcggccacatggggactgagacacggccgagactactgcgggaggcagcagtagggaagattgcacaatggggagaagccggatgcagcgacaccgcgtgggggatgacgaccttcgggttgtagactccttagaccgtcaacgaaggttttctgacggtagatggagaagaagcaccggctaactacgtgccagca

SEQ ID NO: 5021 - DNA, 490 bp, Unknown
  Ascusbbf_1347284, encodes 16S rRNA
agcgtttgatcatggctcaggatgaacgctggcggcgtgcttaacacatgcaagtcgaacgaggtctaattacgtcagttttctgacggaagctcctgtactgagtggcggacgggtgtgtaacgcgtgggacacctgccctgctccgcggtataccagttggcaacgcctgttaataccgcataagcgcacagcaccgcattgtgcagtgtgtaaaactccggtgtaaccggatggtcccgcgtctgattgggccgttcgcagggttaccgccttccacaccgacgatcagtagccgtcctgggagagggaacgggcacagtgggactgagacacgacccaaacacctacgggaggcagcagtggggaatattgaacagtgggggaaaccctgatggcgcggcgccgcgtgagtgaagaagtatgtcggtatgaaaagctctagcagcagggaagaagatgacggtacctgcagaagcagcaccggcta

SEQ ID NO: 5022 - DNA, 490 bp, Unknown
  Ascusbbf_1377455, encodes 16S rRNA
agagtttgatcatggctcaggatgaacgctggcggcgtgcctatcacatgcaagtcgaacggagttactttggtgaagttttcggacggatctgatttaacttagtggcgtacgggtgagtaatgcgtgagcaacctgcccttcagagggggacaacagttggaaacgactgctaataccgcataatgtatccgggagccatctcctggataccaaaggagaaatccgctgatggatgggcacacgtctgattagctagttggtgaggtaacggctcaccaaggctgcgatcagtagccggacttagaggttgacggaccacattggaactggaggacggcccagcgaccaacgggaggcagcagtggggaagattggccatgggcgaaagcctgacccagcaacgccgcgtgaaggaagaaggccttcgggttgtaaacttcttgtaagagggacgaagaagtgacggtacctcttgaataagcaacgg

SEQ ID NO: 5023 - DNA, 490 bp, Unknown
  Ascusbbf_1444576, encodes 16S rRNA
agagtttgatcatggctcaggacgaacgctggcggcgtgcttaacacatgcaagtcgaacggtgaagtcggagcttcctctgccggatcagtggcgaacgggtgagtaacacgtgagtaacctgcccctgactctgggataaccattggaaacgatggctaatactggatacgagttgcctccgcatggagagtgcctggtaagatctatctgtctgggatggactcgcggcctttcggcttgttggtggggtaatggactaccaagacgacgacgggtagccggcctgatagtgcgaccgggcacactgggactgagacacggaccagactcctacgggaggcagcagaggggaatattgcacaatgggcgaaagccggatgcagcgacgcggcgtgagggatggcggccttcgggttgtaaaccactttcagcagggaagaagcgaaagtgacggtacctgaagaagaagcgccggctaactacgtgc

SEQ ID NO: 5024 - DNA, 490 bp, Unknown
  Ascusbbf_1324227, encodes 16S rRNA
agagtttgatcatggctcaggataaacgctggcggcgcacataagacatgcaagtcgaacggacttaactcattcttaacgattgagagcggttagtggcggactagtgcgtactgtataagtaacctgcctatcagaggggaacaaccgttggaaacgactgctactaccgcctatgccacgagaatcacatggttcaagtgggcaaggagcaatcctctgatagttggacttatatctgattagctattttgtggggtaacggcctaccacgtcgacgataagtagccggactgagaggttacacggacaacttgggactgagatacggcccagactcctacgagaggcagcagtcgggaatattgcgcaatggaggaaactctgacgcagtgacgccgcgtgcaggaagaaggttttcggattgtaaactgctttagacagggaagaaaaaagacagtacctgtagaataagctccggctaactacg

SEQ ID NO: 5025 - DNA, 490 bp, Unknown
  Ascusbbf_1324240, encodes 16S rRNA
agagtttgtcatggctcaggatgaacgctagctaccggctctacacctgcaagtcgagacgaaacgatattgaaagcttgcttttgttaggcgtcgaccggcgcacgggtgagtaactcttatcaaacatccctggaaatggggcataatccgtggacacgcggcctaatgtcctatgtgctccgaagaggacatctgatttggagtaaagattcctcgtttccggatggggatgcgtctgattagcttcctggcggggtaacggcccaccagggcgacaatcagtgggggttcggggaggtagagctcgcatatgagaacgatgagccagttcgagactctgagacgggcaggactcatgcaggagggagcaggagggagtatcgcaaactgcagagtaccgtgctgcagcaatgccgcatgggtgaagaagggcttcgaggtgtaaagaaattgcgccgcgggtggtgtaatgaagttaccgtaagaa

SEQ ID NO: 5026 - DNA, 490 bp, Unknown
  Ascusbbf_1445719, encodes 16S rRNA
agagtttgatcctggctcaggatgaacgctagctacaggcctaacacatgcaagtcgaggggcagcataccgaaagctttcttttgtttatggcgaccggcgcacgggtgagtaacgcgtatccaaccttccccttagtatggcatatcccggcgaaagtcggattaataccctttgttttcctttgtggacatctgaattggaataaatatttatcgctcatggatggtgatgcgtctgattaggtttgtggcgggttaacggcccaccaagcgatcgatcagtaggggttctgagagttcggtcccccacattggtactgagacacgacacaaactcctacgggaggcagcagtggggaatattggtcaatggacgagagcctgaaccagccaagtagcgtgcaggatgacggccctatgggttgtaaactgctttcgcatgggaataaagtgagggacgtgtccctttttgtatgtaccatgagaat

SEQ ID NO: 5027 - DNA, 490 bp, Unknown
  Ascusbbf_1324253, encodes 16S rRNA
agagtttgatcatggctcaggataaacgctggcggcgcacataagacatgcaagtcgaacggacttaatcaatagtttactattgatgcggttagtggcggactggtgagtaacacgtacgtcacccgcctatcagaggggaacaacagttagaaatgactgctaataccgcatatgccataactagcgcatgatcgaagtgggaaagtagcagtccactgatagatggacttgcgtctgattagatagttggtagggtaacggcctaccaagtcgacgatcagtagccggactgagagattaaacggcgaacttgggactgaggtacggcccagactcctaagggaggcagaagtcgggaatattgagcaatggaggaaacgctgacgcagtgacgccgcggggaggaagaaggttttcggattggaaactgctttagacagggaagaaacaagacagtacctgtagaataagctccggctaactacgt

SEQ ID NO: 5028 - DNA, 490 bp, Unknown
  Ascusbbf_1324248, encodes 16S rRNA
agagtttgatcctggctcaggataaacgctggcggcgcacataagacatgcaagtcgaacgaacttaatcgaaagtttacttttgacgcggttagtggcggactggtgagtaacgcgtaagcaatctgcctatcagaggggaataacagtgagaaatcattgctaataccgcataagctgtgagtatcgcatgatacaaatagaaaaggagcaatccgctgatggatgagcttgcgtctgattagttagttggtggggtaacggcctaccaagacgatgatcagtagccggactgagaggttaaacgggccaattgggactgagataccgcccagaatcctaagggggggaggagtagggaatattgcggaaatgaggacacgctgacgcagtgacgccgcgtggaggaagaaggttttcggattgtaaacttctttagatagggaagaaaaaaatgacggtacctatagaataagctccggctaactac

SEQ ID NO: 5029 - DNA, 490 bp, Unknown
  Ascusbbf_1347338, encodes 16S rRNA
agagtttgatcctggctcaggataaacgctggcggcgcacataagacatgcaagtcgaacggacttaactcattcttaacgattgagagcggttagtggcggaccggtgagtaatgtataagtaacctgcctatcagaggggaacaacagctggaaacgactgctaataccgcatatgtcacgagaatcacatggttcaagtgggaaaggagcaatccgctgatagatggacttatatctgattagatagttggtggggtaacggcctaccaaggcgacggtcagtagccggactgagaggttgagcgacgaacttgggactgagatacggccgaagtgcctacgggaggcagcagtcggaaatattgcgcaagggaggaaacgctgacgcagtgacgccgcgggcaggaagaaggttttcggattgtaaactgctttggacagggaagaaaaaagacagtacctgtagaataagctccggctaactacg

SEQ ID NO: 5030 - DNA, 490 bp, Unknown
  Ascusbbf_1346996, encodes 16S rRNA
agagtttgatcctggctcaggataaacgctggcggcgcacataagacatgcaagtcgaacggacttaatcaatagtttactcttgattcggttagtggcggactggtgagtaacacgtaagtaacctgcctatcagagtggaacaacagttagaaatgactgctaataccgcatatgccatacctatcgcatgatagaagtgggacaggagcaatccactgttagatggacttgcgtctgattagatagttggtagggtaacggcctaccaagtcgacgatcagtagccggactgagaggttaaacggcaacattaggaccgagatacggcacagacgccgacgggaggcagcagtcgggaagattgcgcaagggaggaaactctgacgcagtgacgccgagtgcaggaagaaggttttcggattgtaaactgctttagacagggaagaaacaagacagtaccggtagaataagctccggctaactacgt

SEQ ID NO: 5031 - DNA, 486 bp, Unknown
  Ascusbbf_1323595, encodes 16S rRNA
agagtttgatcctggctcagaacgaacgctagcggcaggccttaggcatgcaagtcgaacggacgccagagtggcttgcccttctgaagttagtggcgcacgagtgagtaacgcgcgggaaactgcccttccctggggcctaacgtctggatacggacgctagtaccgcatacgcccgcaaggcgaaggacttatcggtgatgggtgtgcccgcttgtgattagcttgttgggggggtaatggcctaccgaggcgctgctccctagctggtctgcgcggacgatcagccacgctggaactgagacacgggccagactcctacgggaggcagcagctaagaatattgggcaatggaggaaactctgacccagccatgccgcgtgaatgaagaaggccttcgggttgtaaagttcttttagtcatgaagatgatgacagtagtgacagaaaaagcaccggctaactgcgtgccagcagccgcggtaat

SEQ ID NO: 5032 - DNA, 486 bp, Unknown
  Ascusbbf_1377248, encodes 16S rRNA
agagtttgatcctggctcagaacgaacgctggcggcaggtcttaggcatgcaagtcgaacggacgacagagtggcttgccattctgaagttagtggcgcacgagtgagtaacgcgtgggaaactgcccttcactggggaataacgtctggaaacggacgctaataccgcatacgcccgcaaggggaaagatttatcggtgatgggtgtccccgcgttggattagcttgtttgtcgggtaatggcctaccaaggcgatgatccatagctggtctgagaggacgatcagccaccctggaacggagacacggcccagactcatacgggggacagcaggtaagaatagtggaaaatgggggaaactctgacccagccatgccgcgtgaaagaagaaggcttgcggtgtgtaaagttcttttagtcatgaagaagatgacagtagcgacagaaaaagcaccggctaacttcgtgccagcagccgcggtaat

SEQ ID NO: 5033 - DNA, 490 bp, Unknown
  Ascusbbf_1323601, encodes 16S rRNA
agagtttgatcctggctcaggataaacgctggcggcgcacataagacatgcaagtcgaacggacttaatcaatagtttactattgaagcggttagtggcggactggtgagtaacacgtaagtaacctgcctatcagaggggaacaacagttggaaatgactgctaataccgcatatgccataactatcgcatgatagaagtgggaaaggagcaatccactgatagatggacttgcgtctgattagatagttggtagggtaacggcctaccaagtcgacgatcagtagccggactgagaggttaagcggccaacttgggactgagatacggcacagactcctacgagtggcagaagtggggaatattgagcaatggaggaaactctgacgccgacacgccgagtggaggaagaaggttttcggattgtaaaatgctttagaaagggaagaaacaagacagtacctgtagaataaggaccggctaactacgt

SEQ ID NO: 5034 - DNA, 490 bp, Unknown
  Ascusbbf_1445798, encodes 16S rRNA
agagtttgatcctggctcaggatgaacgctagctacaggcctaacacatgcaagtcgaggggcagcgggggcagagcttgctctgcctgccggcgaccggcgcatgggtgcgtaacgcgtatcgaacctcccccatactcgggaatagccttgcgaaagtaagattaatgcccgatggtctcagaatatgacatcatgctttgagtaaagattcatcggtatgggatggcgatgcgtctgattagatagttggcggggtaacggcccaccaagtcgtcgatcaggaggggttctgagaggacgggcgcgcacattggaactgagagacagaccaaaatcctacgagaggcaggagtcaggaatattggacaatgatcggaagactgaaccagccgagtagcgtgaaggatgcctgccctacgggttgtaaacttcttttatgcgggaatcaagtgccccacgcgtggagtattgcatgtaccgcgtgaat

SEQ ID NO: 5035 - DNA, 487 bp, Unknown
  Ascusbbf_1445792, encodes 16S rRNA
agagtttggcagggagcagaacgaacgagggcggcaggcgtaacacaggcaagtggagcgggagggatggagagcgtgcgagtgagcatgagagaagcgcacgggggaggaacacgggggaacagacctttgggtgggggacaacagggggaaacgactgctaataccgcataagccctgagggggaaagattaattgccgagagattggcccgcggaagattaggtagtaggtggggtaacggcctacctagccgaggatctatagcggtgcggagaggacgatcagccacattggaactgagacacggtccagactcctacgggaggcagcagtgaggaatattgggcaatggagggaactctgacccagccatgccgcgtgagtgaagaaggttttcggattgtaaagctctttcagacgggaagatgatgacggtaccgtcagaagaagcaccggctaacttcgtgccagcagccgcggtaat

SEQ ID NO: 5036 - DNA, 486 bp, Unknown
  Ascusbbf_1324217, encodes 16S rRNA
agagtttgatcatggctcagaacgaacgctggcggcaggtcttagtcaggaaaggagaaaggaagaaagtggggcggggaagggggaacggaggggggaaggagtgaggaaggagagggaaacgggaagggaagggggaagaagggggggaaagggaggagaagaacgcatacgccgggaaggggaaagagttatcggtgatggaggtgcccgcgttggattagcttgttggtgtggtaatggcctaccaaggcgatgatccatagctggtctgagaggacgatcagccacgctggaacggagacacggtcacgcctcctacgggaggcagcagctaagaatattgggcaatggaggaaactctgaaccagccatgccgcgtgaatgaagaaggccttcgggttgtaaagttcttttagtcatgaagatgatgacagtagtgacagaaaaagcaccggctaacttcgtgcccgcagccgcggtaat

SEQ ID NO: 5037 - DNA, 490 bp, Unknown
  Ascusbbf_1377422, encodes 16S rRNA
agagtttgatcctggctcaggatgaacgctagcggcaggcttaacacatgcaagtcgaggggcagcgcggggtagcaatactctggcggcgaccggcggaagggtgcgtaacgcgtgagcaacttgcccgtcactgggggataggcactggaaacgttggttaatactcactaccatatggattcacatggttttatattgaaagattcgttggtgccgtatgggctcgcgtaacattcgctagtcggcggggtaacggcccaccgagggtaggatgtttaggggttctgagagtaaggtcccccccactgacactgagacacggtccagactcctacgggaggcagcagtgaggaatattggtcaatgggcggaagcctgaaccagccatgccgcgtgcaggaataaggccctatgggtcgtaaactgtttttccttgagggcaataagggtcacgagtggcccgatgagagtatcaggggaataagca

SEQ ID NO: 5038 - DNA, 490 bp, Unknown
  Ascusbbf_1347403, encodes 16S rRNA
agagtttgatcatggctcaggacgaacgctagcggcgtgcctaacacatgcaagtcgaacggaacttatttagaagattctttcgggatgagtttacttacgtttgggtgcgtacgggtgagtaacgcgtgcgtaacctccctttgagcgggtaataacaatctgaaaatattgctaataccgcataacatatatttgtcgcgtggcaggtatattaaagatttcatcgctcaaagatgaactcgcgtccgattagttagttggggcggtaacggctacccaagaccgcgatcggtagccgaactgagaggttgaacggccacattgggactgagacacggcccagacgccgacgggaggcagcagtgggggatactgcgcaatgggggtaaccctgacgcagcaacgccgcgtgaaggatgaaggttttcggattggaaacttcttttattaaggacgaaaaatgacggtacttaatgaataagctccg

SEQ ID NO: 5039 - DNA, 490 bp, Unknown
  Ascusbbf_1445935, encodes 16S rRNA
agagtttgatcctggctcaggatgaacgctagcggcaggcttaacacatgcaagtcgaggggcagcgcggggtagcaatactctgtcggcgaccgtcggaagggtgcgtaacgcgtgagcaactttcccttcactgggggataggcactggaaacgttgtgtaatactcccttacatatcgattcacatggattgatattgaaagattcgttgctgacggatgcgctcgcgtaacattagctagtcgtcgtggtaacggcccaccgaggctacgatgtgtaggggttttgataggaaggtcacaagcgatggaactaagagacggaccagactcctacgggaggaagcagtgaggaatattggtcaatgggcggaagcctgaaccaggcaggccgcgtgaaggaataaggccctatgggtcgtaaactgcttttccttgagggcaataagggtcacgtggggcccgatgagagtataaggggaataagca

SEQ ID NO: 5040 - DNA, 490 bp, Unknown
  Ascusbbf_1347211, encodes 16S rRNA
agagtttgatcctggctcaggttaaacgctggcggcgcacataatacatgcaagtcgaacgaacttaatcgaaagtttacttttgatgcggttagtggcggactggtgagtaacgcgtaagcaatctgcctatcagaggggaataacagtgagaaatcatttctaataccgcataagctgtgagtatcgcatgatacaaatagataaggagcaatccgctgctagattagcttgcgtctgatgagatagttggtggggtaacggcctaccaagacgatgatcagtatccggattgagagggataaccggcacattgggaatggggtacgggcccgactcctacgggggggagcagtcaggaatattgcgaaatggaaggaactctgaagcaaggaagccgcgggcaggaagaaggttttcggattgtaaacggatttagagagggaagaaaaaaatgacggtgcctatagaagaagcaccggctaactac

SEQ ID NO: 5041 - DNA, 490 bp, Unknown
  Ascusbbf_1377411, encodes 16S rRNA
agagtttgatcctggctcaggatgaacgctggcggcgtgcctaatacatgcaagtcgaacgagggtgcttgcaccctagtggcgaacgggtgagtaacacgtaggtaacctgcccttaagcttgggatacccagaggaaactttggctaataccggataacaacagaggaggcatctcttcagtttgaaaggccctttacggggtcacttaaggatggacctacggcgcattagctagttggtgagataacagcccaccaaggcggggatgcgtagccgacctgagagggtgatcggcccaactggaaccgggacacggtccaaaccccgacgggaggcagcaggaaggaggttgcggcaatgggggaaaccctgaccgagcaacgccgcgtgagtgatgacggccctatgggttgtaaaactctgttgtaagggacgaatgattcgcttaggaaatgaagcgggtttgacggtaccttaccagaaagcc

SEQ ID NO: 5042 - DNA, 490 bp, Unknown
  Ascusbbf_1347381, encodes 16S rRNA
agagtttgatcatggctcaggacgaacgctggcggcgtgcttaacacatgcaagtcgagcggtaaggccctgcggggtacacgagcggcgaacgggcgagtaacacgtgagcaagctgccctccacttcgggataaccatcggaaacggtggctaatactggatatgaccttgccacgcaagtggtggggtggaaagttctggcggtggaggatgtgctcgcggccaatcagcttgttggtgaggtactggctcaccaaggcttcgacgggtagccggcctgagagggtgaccggccacactgggactgtgacacggcacagactcctacggaaggcagcagtgtggaatgttggacaatgggcgaaagcctgatccaggaacgccgcgtgaggggtgactgccttcgggttgtaaacctctttaagtaccgacgaagcgagagtgacggtaggtacagaagaagcaccggccaactacgtgccagcagc

SEQ ID NO: 5043 - DNA, 490 bp, Unknown
  Ascusbbf_1347313, encodes 16S rRNA
agagtttgatcctggctcaggataaacgctggcggcgcacataagacatgcaagtcgaacggacttaactcattattaacgattgagtgcggttagtggcggactggtgagtaatgtataagtaacctgcctatcagaggggaacaacagttggaaacgactgctaataccgcatatgccacgagaatcacatgggtcaagtgggaacggagcagtccgctgataaatggacttatatctgattagctagtgggtggggtaacggcctaccaaggcgacgatcagtagccggactgagtggtgaaaaggccacattgggattgggaaacggcccagactctaacggaaggaagcagagggaaaaatggcgaaatggaggaaactctaacgaagtgaggcggcgggcaggaagaaggtttccggattgtaaactgctttagacagggaagaaaaaagacagtacctgtagaagaagcaccggctaactacg

SEQ ID NO: 5044 - DNA, 490 bp, Unknown
  Ascusbbf_1324163, encodes 16S rRNA
agagtttgatcctggctcaggatgaacgctagctacaggcttaacacatgcaagtcgaggggcagcataacgaaagcttgcttttgttgatggcgaccggcgcacgggtgagtaacgcgtatctaaccttccccttagtagggcatagcccggcgaaagtcgtattaataccctatgttttccgttgaggatatctgaagtggaacaaagatttatcgctaagggatggggatgcgtctgattaggttgttggcggggtaacggcccaccaagccatcgatcagtaggggttctgagagggagggcaccaacagtggtactaggacacggaccaaactcctacgggaggcagcggtgcggaatagtggtcaatgggcgagagccagaaccagccaagtagcgtgaaggatgacggccctatgggttgtaaactgcttttgcatgggaataaagtgagggaggtgtccagttgtgtatgtaccatgagaat

SEQ ID NO: 5045 - DNA, 486 bp, Unknown
  Ascusbbf_1377590, encodes 16S rRNA
agagtttgatcatggctcagaacgaacgctggcggcaggtcttaggaaggaaaggagaaaggaagaaagtgtggcttgaaagggggaacggaggggcggagcactgaggaaagagggggaaagggggagggaagggggaagaagggctgtaaagggaagagaagaacgcatacgccgggaaggggaaagattgttcggtgatggatgtgcccgcgttggattagcttgttggtggggtaatggcctaccaaggcgatgatccatagctggtctgagaggacgatcagccacgctggaactgagacacggtacctcctcctacgggaggcagcagctaagaatattgggcaatggaggaaactctgacccagccatgccgcgtgaatgaagaaggccttcgggttgtaaagttcttttagtcatgaagatgatgaccgtagtgacagaaaaagcaccggctaacttcgtgcccgcagccgcggtaat

SEQ ID NO: 5046 - DNA, 490 bp, Unknown
  Ascusbbf_1377604, encodes 16S rRNA
agagtttgatcctggctcaggataaacgctagctgcgcgcttaacacatgcaagtcgaaggaccttaatcggatgtctaccttactttggcttcgacccgcacacgtgtgagtcacgcgtgtcctcccttcctctgagtggaacataaccgagcaatcatcggaataataccctatgttctgcgtctcgcacatctgaagtagagcagaagctattcgctgatagatgagcatgcgtctgattagttagtgggcggggtaacggcccacctagccgacgatcagtagccggactgagaggttaaacggcaacattgggactgggatacggcccagactcctacgggaggcagcagtcgggaatattgcgcaatggaggaaactctgacgcagtgacgccgcgtgcaggaagaaggttttcggattgtaaactgctttagatagggaagaaaaaaatgacggtacctatagaataagctccggctaactac

SEQ ID NO: 5047 - DNA, 490 bp, Unknown
  Ascusbbf_1445886, encodes 16S rRNA
agagtttgatcctggctcaggatgaacgctagcgataggcctaacacatgcaagtcgaggggcagcacatgaagtagcaattcttattgtcgcgaccggcgcacgggtgagtaacgcgtctgcaacctgcctccaacacgggaataacccgttgaaagacggactaataccccataacacagggatcccgcatgggaatatttgttaaagattaatcggttgtagatgtgcgtgcgttccattagcttgttggtgcggtaacgactcaccacggccacgatggataggggaactgagaggtaggtcaccaacagtgggactggaaaccggaccagaatccgccgggaggaagcagtgaggaagattggtcaatggagggaaggctgaaccagccacgtagcgtgaaggaagacggccctacgggttgtaaacttcttttgtaagagaataaagtggaggacgggtactattttgcatgtaccttacgaat

SEQ ID NO: 5048 - DNA, 486 bp, Unknown
  Ascusbbf_1377589, encodes 16S rRNA
agagtttgatcctggctcagaacgaacgctggcggcatgtcttaggcatgcaagtcgaacggacgtcagagttccttgccattctaatgtcagtggcgcacgtgagggttacgcgtgctaccctcccctttactggggaataccgtctggaaacggacgctaataccccatacgcccgcctggtgcgagatttatcggtgatggctgtgctgacgttggtttagcctgttggtggggcagaggcctaccaaggcgttggtccatagctggtctgcgaagacgaccagccacgctagaagtgggagacgggccagagtcctacgggagggagcagggatgaagatggaacaacggaggaaacacggagccagtcagaacgcgaaaatgaagagggcctgcggatcgtaaagttcttttagacaggaagaggatgacagtagggacagaagaagcaccggctaactacgtgccagcagccgcggtaat

SEQ ID NO: 5049 - DNA, 490 bp, Unknown
  Ascusbbf_1480771, encodes 16S rRNA
agagttgatcctggctcagaacgaacgctggcggcaggcctaacacatgcaagtcgagcgcaccttcgggtgagcggcggacgggtgagtatcgcgtgggaacgtgcccttctctacggaatagtcctgggaaactgggggtaataccgtatacgcccttttggggaaagatttatcagagaaggatcggcccgcgttggattaggtagttggtggggtaatggctcaccaagccgacgatccatagctggtttgagaggatgatcagccacactgggactgagacacggcccagactcctacgggaggcagcagtggggaatattggacaatgggcgcaagcctgatccagccacgccgcgtgagtgatgaaggccttcgggtcgtaaagctctgtggggagggacgaaccgctgcaggttaatagtctgcagcatgacggtacctccttagcaagcaccggctaacttcgtgccagcagccgcggtaa

SEQ ID NO: 5050 - DNA, 490 bp, Unknown
  Ascusbbf_834301, encodes 16S rRNA
agagtttgatcctggctcaggacgaacgctggcggcgtgcttaacacatgcaagtcgagcggtaaggcctccttcggggggtacacgagcggcgaacgggtgagtaacacgtgagtaatctgcccttcactctgggataagcaccggaaacggtgtctaataccggatacgaccaactgtcgcatggtgtgttggtggaaagttttttcggtgggggatgtgctcgcggcctatcagcttgatggtggggtaatggcctaccatggcgtcgacgggtagccggcctgagagggtgaccggtcacactgggactgagacacggcccagactcctacgggaggcagcagtggggaatattggacaatgggcggaagcctgatccagcaacgccgcgtgagggatgacggccttcgggttgtaaacctctttcatcaccgacgaagtccttgcttttggggtgggggtgacggtaggtggagaagaagcaccg

SEQ ID NO: 5051 - DNA, 477 bp, Unknown
  Ascusbbf_1430337, encodes 16S rRNA
agagtttgatcctggctcagaacgaacgctggcggcaggcttaacacatgcaagtcgaacgggcgtagcaatacgtcagtggcagacgggtgagtaacgcgtgggaatctacccagtggtttggaataactcagggaaacttgagctaataccggatacgcccttcgggggaaagatttatcgccattggaagagcccgcgtcggattagctagttggtggggtaatggcccaccaaggcgacgatccgtagccgacctgagagggtgatcggccacattggaactgagacacggtccaaactcctacgggaggcagcagtaaggagttttcggcaatgggggaaaccctgaccgagcaacgccgcgtgagggatgacggccttcgggttgtaaacctcttttagcagggaagaagcgagagtgacggtacctgcagaaaaagcgccggctaactacgtgccagcagccgcggtaat

SEQ ID NO: 5052 - DNA, 482 bp, Unknown
  Ascusbbf_1606103, encodes 16S rRNA
agagtttgatcctggctcaggacgaacgctggcggcgtgcctaatacatgcaagtcgagcggtaaggccccttcgggggtacacgagcggcggacggctgagtagcgcgtaggaacgtaccccaaagtgagggataagcaccagaaatggtgtctaataccgcatgtgatccacggattaaagccttgtgcgctttgggagcggcctgcgtatgattagcttgttggtgaggtaaaagctcaccaaggcgacgatcattagctggtctgagaggatgatcagccagactgggactgagacacggcccagactcctacggggggcagcagtagggaattttgcgcaatgggcgaaagcctgacgcagcaacgccgcgtgatcgtagacgcccttcggggtgtaaagatctgtcagtagggacgaacaatgactgtacctacagaggaagcaccggctaactccgtgccagcagccgcggtaat

SEQ ID NO: 5053 - DNA, 490 bp, Unknown
  Ascusbbf_1421555, encodes 16S rRNA
agagtttgatcctggctcaggatgaacgctggcggcgcgcctaacacatgcaagtcgaacgattaaagcaccttcgggtgtgtataaagtggcgaacggctgagtaacacgtgggcaacctacccttcactctgggatagccacgggaaaccgtgggtaataccggatactccgtgcacaccgcatgatgagcacgggaaagcgcatacggtgaaggatgggcccgcggcctgttagcttgttggtggggtaacggcctaccaaggcaattatgggtagctgggttgagagaccgaccagccagattgggactgagacacggcccagactcctacgggaggcagcagtggggaatcttgcgcaatgggcgaaagcctgacgcagcgacgccgcgtgcgggatgaaggccttcgggttgtaaagcactttcagagggaaggaacaaatgacgttaccctcagaagaagcaccggctaactccgtgccagca

SEQ ID NO: 5054 - DNA, 154 bp, Unknown
  Ascusbbf_1329020, encodes 16S rRNA
agagtttgatcctggctcagggcatcacaacgatagccggcagcatcagcgatgaagaccaacaagtgcccattcatgtggaggctcaggagaaatccgaggaggagatagccaatcagattatcttcagcgaccctgccagcagccgcgtaat

SEQ ID NO: 5055 - DNA, 357 bp, Unknown
  Ascusbbf_897990, encodes 16S rRNA
agagtttgatcctggctcaggacgaacgctggcggcgtgcctaatacatgcaagtcgtacgcttctatttccaccggagcttgctccatcggaaaaagaagagtggcgaacgggtgagtaacacgtgggtaacctgcccatcagaaggggataacacttggaacctacgggaggcagcagtagggaatcttcggcaatggacgaaagtctgaccgagcaacgccgcgtgagtgaagaaggttttcggatcgtaaaactctgttgttagagaagaacaaggatgagagtaactgttcatcccttgacggtatctaaccagaaagccacggctaactacgtgccagcagccgcggtaat

SEQ ID NO: 5056 - DNA, 490 bp, Unknown
  Ascusbbf_912071, encodes 16S rRNA
agagtttgatcatggctcaggatgaacgctggcggcgtgcttaacacatgcaagtcgaacggacaaagaagatttcggttttctttgttagtggcgaacgggtgagtaacgcgtgagtaacctgccctggagtgggggacaacagttggaaacgactgctaataccgcataagcccacagtgccgcatggcacagcgggaaaaggatttattcgcttcaggatggactcgcgtccaattagctagttggtgaggtaacggcccaccaaggcgacgattggtagccggactgagaggttgaacggccacattgggactgagacacggcccagactcctacgggaggcagcagtgggggatgttgcacaatgggggaaaccctgatgcagcgacgccgcgtggaggaagaaggttttcggattgtaaactcctgtcgttagggacgaatcatgacggtacctaacaagaaagcaccggctaactacgtgcca

SEQ ID NO: 5057 - DNA, 186 bp, Unknown
  Ascusbbf_953250, encodes 16S rRNA
agagtttgatcctggctcagacacccttcgtcaaccagcagacaggtcgcttcgacgtagcacagctcacgaagttcctcaacgattacaagtcaaaccagaacccgcagctggccgagcagtacaaggccatctacgactactggcgcttcatcgagaagaccctgcgccagcagccgcggtaat

SEQ ID NO: 5058 - DNA, 166 bp, Unknown
  Ascusbbf_1546535, encodes 16S rRNA
agagtttgatcctggctcaggacttccgcatcaagggcagtcacgactatgtatatggtctgcctgagattaataaggaagagattatgaaagctcagcatttggctaatccaggctgtttcgccacttgtattcaggtagcgttgctgccagcagccgcggtaat

SEQ ID NO: 5059 - DNA, 170 bp, Unknown
  Ascusbbf_953261, encodes 16S rRNA
agagtttgatcctggctcagtatcgttggaagagggattggtgctgaccgaccacattgctggtgcgctcctctctcatggaccgaaacgtatgaactatatcctgatggctctctgccagcggggtgaggcacgctatgcgattgacacccgccagcagccgcggtaat

SEQ ID NO: 5060 - DNA, 343 bp, Unknown
  Ascusbbf_870932, encodes 16S rRNA
agagtttgatcatggctcagaccggtactctgggcaccaattcccagacgggcaccgttcatcagggacatcacgtacttaatcaggcccagacgggtgctgccgcacagctcggcacgcgcgttcttataggtaagctcgcaggtcgggctgccgtggataccgagtttgtgctcgatgtgacggacattcacgccaccctggcgcttgtcatagataaacatggaaaggccgcggccatcgcgggtaccttcctcactgcgggccaggaccaggtggatatcggagtcaccgttggtgatgaaacgcttcacaccgttcagcagccagcagccgcggtaat

SEQ ID NO: 5061 - DNA, 490 bp, Unknown
  Ascusbbf_783437, encodes 16S rRNA
agagtttgatcatggctcaggatgaacgctagcggcaggcctaatacatgcaagtcgaacggtaaatgtcccttcggggatatgagagtggcgcacgggtgcgtaacgcgtatgcaacccacccgctgtcgggggatagcccgtagaaatgcgaattaataccccatgaggagaaagggcggcatcgtacttttttcaaaactttggtgacggcggacgggcatgcgtggcattagatagttggcggggtaacggcccaccaagtcgacgatggctaggggatctgagaggacggtcccccacactggtactgagacacggaccagactcctacgggaggcagcagtaagggatattggtcaatggggggaaccctggaccagccatgccgcgtgaaggaagacggtcctctggattgtaaacttctgttgttagggaagaacggtaagtataggaaatgatacttaagtgacggtacctttcaagaaag

SEQ ID NO: 5062 - DNA, 488 bp, Unknown
  Ascusbbf_1646256, encodes 16S rRNA
agagtttgatcctggctcagaacgaacgctggcggcaggcttaacacatgcaagttgaacgggatttatttagtacttgtactggatgatgagagtggcgcacgggtgagtaatatgtaggaacatacctattggtcgggaataacggttggaaacgacaggtaataccggataagccctgagggggaaagatttatcgccgatagaatggcctgcatcagattaggcagttggtggggtaaaggcctaccaaaccgacgatctgtagctggtctgagaggacgatcagccacattgggactgagacacggcccagactcctacgggaggcagcagtgaggaatattgggcaatgggggcaaccctgacccagccatgccgcgtgagtgaagaaggttttcggattgtaaagctctttcggatgtgacgatgatgacggtagcatctaaagaagccccggcaaacttcgtgccagcagccgcggtaat

SEQ ID NO: 5063 - DNA, 490 bp, Unknown
  Ascusbbf_1365736, encodes 16S rRNA
agagtttgatcctggctcaggatgaacgctggcggcgtgcttaacacatgcaagtcgagcgagaaatcgggaaatgaaacttcggtagatttgaacgatggaaagcggcggacgggtgagtaacacgtgggaaacctgccttttgcagagggacagccgagggaaacttcgattaatacctcataacgcatcatcgtcgcatggcggagatgccaaagatttatcggcaagagatggtcccgcgtctgattagctggttggtgaggtagcggctcaccaaggcgacgatcagtagccggcctgagaggataaacaatcacattaaaactaaaacacaatccaaactcctacaaaaaacaacaataaaaaatattacacaataaacacaaacctaatacagcaacgccgcgtgaaggatgaaggccttcgggtcgtaaacttctgtccaaagggaagaacaaatgacggtacctttggaggaagccccggc

SEQ ID NO: 5064 - DNA, 490 bp, Unknown
  Ascusbbf_1245359, encodes 16S rRNA
agagtttgatcatggctcaggatgaacgctggctacaggcttaacacatgcaagtcgaggggcatcgcatggggttgctcgcaactcctggcggcgaccggcgcacgggtgagtaacgcgtatccaacctgccccgtggtagggtatagcccggtgaaaaccggattaatcccctatgcggtcacgagacggcatccgaccgtgaccaaaggacttccgccatgggatggggatgcgtctgattaggtagtagacggggcaacggcccacctagccgtcgatcagtaggggttctgagaggaaggtcccccacattggaactgagacacggtccaaactcctacgggaggcagcagtgaggaatattggtcaatgggcgatggcctgaaccagccaagtagcgtgagggacgacggccctacgggttgtagacctcttatatgcggggataaagtcactcacgcgtgggtgtttgcaggtaccgcatgaa

SEQ ID NO: 5065 - DNA, 490 bp, Unknown
  Ascusbbf_1409279, encodes 16S rRNA
agagtttgatcatggctcagaacgaacgctggcggcaggcttaacacatgcaagtcgaacgatctcttcggagatagtggcagacgggtgagtaacacgtgggaatctacctggttcttcgggataactgatggaaacgtcagctaataccggatacgcccttttggggaaagatttatcggaatcagatgagcccgcgtaagattagctagttggtggggtaacggctcaccaaggcgacgatctttagctggtctgagaggatgatcagccacactgggactgagacacggcccagactcctacgggaggcagcagttagggatattcgtcaatgggggaaaccctgaacgagcaatgccgcgtgagtgatgacggtcttatagattgtaaaactctgttgtaaaggaagaaaccttattataggtaatgataataagttgactgtactttaccagaaagccccggctaactacgtgccagcagccgc

SEQ ID NO: 5066 - DNA, 151 bp, Unknown
  Ascusbbf_1652934, encodes 16S rRNA
agagtttgatcatggctcagcctggctggatatcatccagtccatcagcctggcgttttcgagccgggcggctgccctcggcatgatcatcatgctcatcggcggcttttcgatgtatatggataagatcggtgccagcagccgcggtaat

SEQ ID NO: 5067 - DNA, 155 bp, Unknown
  Ascusbbf_1643892, encodes 16S rRNA
agagtttgatcctggctcagcaggatttcgctctgcagccgcggggccagtgtatccaccagctcccggcaaatctcaggccgccgctccgccggcacatcctgccagcgcccagcgtactggtcacgtacctgctcgccagcagccgcggtaat

SEQ ID NO: 5068 - DNA, 490 bp, Unknown
  Ascusbbf_1608754, encodes 16S rRNA
agagtttgatcctggctcaggatgaacgctagctacaggcttaacacatgcaagtcgaacgaagcttgagaacagaattcttcggaaggacgtttgatatgactgagtggcggacgggtgagtaacgcgtgagcaacctgcccttcggagggggatagtgtctggaaacggacagtaataccgcataatgttggatgatggcatcttcattcaaccaaagatttatcgccgaaggatgggctcgcgtctgattagatagttggtggggtaacggcctaccaagtcgacgatcagtagccggactgagaggttgaacggccacattgggactgagacacggcccagactcctacgggaggcagcagtggggaatattgcacaatgggcgcaagcctgatgcagcaacgccgcgtggaggaagacggttttcggattgtaaactgctttagatagggaagaaaaaaaatgacggtacctatagaataagctc

SEQ ID NO: 5069 - DNA, 490 bp, Unknown
  Ascusbbf_1679199, encodes 16S rRNA
agagtttgatcctggctcaggacgaacgctggcggcgtgcctaacacatgcaagtcgaacgaagcactggaaatgattccttcgggttgattttcctttaactgagtggcggacgggtgagtaacacgtgagcaacctgcctttcagagcgggatagcagttggaaacaactgataataccgcatgacatgttttctccacatgaggaaaacatcaaataatttttcgctgaaagatgggctcgcgtccgattaaataattggtgagacaacggctcaccaagccgacgatcggtagccggactgagaggtcgatcggccacattaaaactaaaacacggcccagactcctacgggagacagcaatgaaaaatattgcacaataaacgcaaacctaatgcagcaacgccgcgtgagggaggacggtcttcggattgtaaacctctgtccttggggaagaaacaaatgacggtacccttggaggaagccac

SEQ ID NO: 5070 - DNA, 490 bp, Unknown
  Ascusbbf_1378008, encodes 16S rRNA
agagtttgatcctggctcaggacgaacgctggcggcgtgcttaacacatgcaagtcgaacggtaaggccccttcgggggtacacgagtggcgaacgggtgagtaacacgtgggtaatctgccctgcacttcgggataagcctgggaaactgggtctaataccggatatgaactccttccgcatggtgggggttggaaagtttttcggtgcaggatgagcccgcggcctatcagcttgttggtggggtaatggcctaccaaggcgacgacggatagccggcctgagagggtgatcggccacacgggaattgggaaacggcccagatcgcgacggggggaagcagtggggaatattgctcaatgggcgaaagcctgttgcggcgacgccgcgtggggatgacggtcttcggattgtaaacccctttcagtagggacgaagcgcaagtgacggtacctgcagaagaagcaccggctaactacgtgccagcagc

SEQ ID NO: 5071 - DNA, 490 bp, Unknown
  Ascusbbf_1435806, encodes 16S rRNA
agagtttgatcctggctcaggataaacgctggcggcgcacataagacatgcaagtcgaacgaacttaatcgaaagtttacttttgacgcggttagtggcggactggtgagtaacgcgtaagcactctgcctatcagaggggaataacagtgagaaatcattgctaataccgcataagctgtgagtatcgcatgatacaaacagaaaaggagcaatccgctgatagaggggcttgcgtctgattagttagttggtggggtaacggcctaccaaggcgatgatcagtagccggactgagtggttaagagggcacagtgggaatgagatacggcccagacacctaggggaagcggcgatcgggaggaaggcggaatggaggaaactctgacgtagtgacaccgcgtgcaggaagaaagttttcgggttgtaaacggcattagagagggaagaaaaaaaatgacggtacctaaagaataagcaccggctaacta

SEQ ID NO: 5072 - DNA, 486 bp, Unknown
  Ascusbbf_1321601, encodes 16S rRNA
agagtttgatcatggctcagaacgaacgctggcggcaggtcttaggcatgcaagtcgaacggacgacagagtggcttgccattctgaagttagtggcgcacgagtgagtcacgcgtgggaaactgcccttcactggggaataacgtctggatacggacgctaataccgcatacgcccgccaggggaaagatttatcggttatggttgtgcccgggtcggattagcttgttggtggggtaatggcctaccaaggcgatgagccatagctggtctgagaggacgatcagccacgcgggaactgagacacgggccagactcctacggggggcagcagctaagaatattgggcaatggaggaaactctgacccagccatgccgcgtgaatgaagaaggcctgcggggtgtaaagttcttttagtcatgaagatgatgacagtagtgacagaaaaagcaccggctaactgcgtgccagcagccgcggtaat

SEQ ID NO: 5073 - DNA, 490 bp, Unknown
  Ascusbbf_1321923, encodes 16S rRNA
agagtttgatcatggctcaggacgaacgctggcggcatgcttaacacatgcaagtcgaacggactgattccttcgggttgaaagttagtggcgaacgggtgagtaatgtatgagcaacctgcctctatcaacgggataacagttggaaacgactgttaatacggtataagactacggcaccgcatgatgttgcggtaaaagatttttcggatagagatgggctcatatcccattggctagttggtgagataacagccaaccaaggcgacgatgggtagccgagctgagaggctgatcggcgacaatgggactgagacacgacccagacgcctacgggaggcagcagtggggaatattgggcaatgtaggcaactctgacccagcaatgccgcgtgagtgatgaaggtaattttattgtaaagctcttttctcaggaacgaataaagatgacggtacctgaggaataagccccggctaactacgtgccagc

SEQ ID NO: 5074 - DNA, 486 bp, Unknown
  Ascusbbf_1372186, encodes 16S rRNA
agagtttgatcatggctcagaacgaacgctggcggcaggtcttacacatgcaagtcgaacggacaacggagtagcttgccattctgactttcgtgtcgcgcgcgtgagtaacgcgtgggaaactccccttcactggggaatatcgtgtggcaacggaccctaataccgcacacgcccccaaggggaaagagttatcggtggtgggtgtgcccgcgaccgattagcttgttgtgggagtagtggcctaccaaggcgatgatccatagctgggctgagaggacgatcggccacgctggaacggggacaaggagcagagtcctacgggaggtagcagaaaagaagattgggcaatggagggaactcggagcaagccatgccgcgggaatgaagaaggccattggggggtaaaggtatgttagtcatgaagatgatgaaagtagggacagaaaaagcaccggccaacctcgtgccagcaggcggggtaaa

SEQ ID NO: 5075 - DNA, 490 bp, Unknown
  Ascusbbf_1321625, encodes 16S rRNA
agagtttgatcctggctcaggatgaacgctagcggcaggcttaacacatgcaagtcgaggggtaacgcggggtagcaagactctggcgacgaccggcgcacgggggcgtaacgcgtatgcaaccgacctgtaacagggggagaacggagagaaaggtccactaatcccccatatggttagagattcgcaggtgtctcgaacgaaagcttcggtggtgacggatgagcatgcgggacattagctagttggtaaggtaacggcgtaccaaggcgacgatgtctaggggcgctgagaggcttagccccccccccgttcctgcgcccccgcccagcctcctccgcgaggcagcagtgtcgactattggtccatggacggaagtctgaaccagccatgccgcgtggaggcagacggtcctatgggttgtaacctccttttgttcgagagtaatacgaggcttgcgcgcctcgatgagcgtatcggacgaataagc

SEQ ID NO: 5076 - DNA, 490 bp, Unknown
  Ascusbbf_1372198, encodes 16S rRNA
agagtttgatcctggctcaggatgaacgctagcggcaggcttaacacatgcaagtcgaggggtaacgcggggtagcactactctggcgacgaccggcgcacgggtgcgtaacgcgtatgcaacctacctgtaacaggggtataacggagagaaatttccactaatcccccatattgttagagattcgcatgtttctctatcgaaagcttcggtggttacggatgggcatgcttgacattagctagttggtaaggtaacgacttaccaagtcgacgatttctaggggagctgagagacttatccccctgactgggacagagacacggcccagactcctgaggcaggaggcagtgaggaatagtggtcaatggaaggaagtctgaaccagccaggccgcgtggaggaagaaggtgctatgggttgtaaactccttttgttcgagagtaataagaggcttgcgagcctcgatgagagtatcggacgaataagc

SEQ ID NO: 5077 - DNA, 486 bp, Unknown
  Ascusbbf_1372179, encodes 16S rRNA
agagtttgatcctggctcagaacgaacgctggcggcaggtcttaggcatgcaagtcgaacggacgacagagtggctcgccattctgaagttagtcgcgcacgcttgtgtaacgcgcgggaaactgctcttcactggtggataatgaccggaaacggaccctcataccgcatccacccgcacggggaaacatttctcggtggtggatgtgcttgctatggattagctcgtcggtggggtaatggcctaccaaggcgatgatccatacctggtctgagaggacgatcagccacgctggaactgagacacggtccagactgctacggggggcagcagctaagaatattgggcaagggaggagactccgagccagccatgcagcgggaatgaagaaggccttcgggtgggaaagttcttttagtcatgaagatgatgacagtagtgacagaaaaagcaccggctaactccgtgccagcagccgcggtaat

SEQ ID NO: 5078 - DNA, 490 bp, Unknown
  Ascusbbf_1321932, encodes 16S rRNA
agagtttgatcctggctcaggatcaacgctggcggcgtgcctaatgcatgcaagtcgaacggggtggccttcgggtctcttacgtggcggacgggtgaggcacacgtgggcaacctgcctgttggagggggctaaccgctgggaacagccggtaataccgcataatcctggatctcgtgtgggagatctggggtcagtcgaaaaacgccgaccgaccgccctgcgtccgattagctagacggtggggtaacggcctactgtcgacgtgctcggtagctggtttgagaggatgatcagccacacggggactgggaaagggccacgactcctacgggaggcagcagcaaggaagtttccgcaatgggcgaaagcctgacggagcaacgccgcgtgtgggatgacgcttttcggagtgtaaaccactgttcgtggggacgaagcactgacggtacccacggaggaaggcccggctaactacgtgccagcagcc

SEQ ID NO: 5079 - DNA, 486 bp, Unknown
  Ascusbbf_1343839, encodes 16S rRNA
agagtttgatcctggctcagaacgaacgctggcagcaggtcttaggcatgcaagtcgaacggacgacagagtggctttcccttctgtagttagtgtcgcacgagtgcgtaacgcgtgtgaaactgcccttcactggggaataacgtctggacgcggacgctaataccgcatacgcccgcccggggaaagatttatcggtgatggatggaccggcgtttggttggctttttggtgtggtaatggcctaccaaggcgatgatccatagctggtcttagaggacgatcagccacgctggaactgggacacggtccagactcctacgggaggcagcagctaagaatattgggcaatggaggaaactctgacccagccatgccgcgtgaatgaagaaggccttcggggtgtaaagttctttgaggcatgaagatgatgacagtaaggacagaaaaagcaccggctaacttcgtgccagcagccgcggtaat

SEQ ID NO: 5080 - DNA, 490 bp, Unknown
  Ascusbbf_1372156, encodes 16S rRNA
agagtttgatcctggctcagaacgaacgctggcggcatgcctaacacatgcaagtcgaacgagacctccgggtctagtggcgcacgggtgcgtaacgcgtgggaacctgcccttaggttcggaataactcctcgaaaggggtgctaataccggataatgtcttcggaccaaagttttatcgcctttggatgggcccgcgtcggattctccagttgttggggtaagggctcaccagggggagaagcccgagctggtcttggaggatcataagccaaactgggactgagacacggaacatcggcctgcgaaacggcgcagactgcaacggggggcagcagaggggagtattagccaacgagggagagcctgatacggaaatgccgcgtgagggatgaaggctttagggttgtaaagctcttgtaccagggatgataatgacagtacctggagaataagctccggctaactccgtgccagcagccgcggtaat

SEQ ID NO: 5081 - DNA, 490 bp, Unknown
  Ascusbbf_1435810, encodes 16S rRNA
agagtttgatcatggctcaggataaacgctggcggcgcacataagacatgaaagtagaaaggacttaatgaatgagtaaggattgagagaggggaggggaggaagggtgagtaagggagaaggaaaagggagagaagaggggaaaaaaagggggaaaagaaggagaataccgcatagggtacgagaatcacatggttcaagtgggaaaggagcaatccgctgatagatggacttatatctgattagctagttggtggggtaacggcctactacggcgacgatacgtagccggactgagaggttaaactccaccattgggactgaggtacggcccacactcctacgggaggcagaagtcgggaagattgcgaaatggaggaaactctgaggcagtgacgccgcgtgcaggaagaaggttttcggattggaaactgctttagacagggaagaaaaaagacagtacctgtagaataagctccggctaactacg

SEQ ID NO: 5082 - DNA, 490 bp, Unknown
  Ascusbbf_1372205, encodes 16S rRNA
agagtttgatcctggccaggacgaacgctggcggcatgcttaacacatgcaagtcgaacggactgattccttcgggatgaaagttagtggcgaacgggtgagtaatgtatgagcaacctgcctctgtcaacgggataacagttggaaacgactgctaatacggtataagaccacggcaccgcatggtgctgcggtaaaagatttttcggacagagatgggctcatatcccattagctagttggtgagataatagcccaccaaggcgacgatgggtagccgagctgagaggctgatgggccacgttgggaatgaaacagggccacggcaccgacggaaggcagcagtggggaaggttgggcaatggaggaagctctgactcagcaatgccgcgtgagcgatgaaggtaattttattgtaaagctattttctcaggagcgaataaagatgacggtacctgaggaataagccccggctaactacgtgccagca

SEQ ID NO: 5083 - DNA, 472 bp, Unknown
  Ascusbbf_1343844, encodes 16S rRNA
agagtttgatcatggttcagagcgaacgctggcggcatgcttaacacatgcaagtcgcacgaaggtttcggccttagtggctgacgggtgagtaacgcgtaggaatctatccatgggtgggggatcactctgggaaactggagctaataccgcatgatacctgagggtcaaaggcgcaagtcgcctgtggaggagcctgcgttcgattagcttgtggggggggtaatggcctaccaaggcgatgatcgatagctggtctgcgaggatgatcagccacactgggactgagacacggcccagactcctacggggggaagcaggggggaatagtggacaatgggggcaaccctgatccagaaatgccgcgtgtgtgaagaaggttttcggagtgtaaagctctttcggcggggacgatgatgacggtacccgcagaagaagccccggctaacttcgtgccagcagccgcggtaat

SEQ ID NO: 5084 - DNA, 490 bp, Unknown
  Ascusbbf_1341354, encodes 16S rRNA
agagtttgatcctggctcaggacgaacgctggcggcgtgcttaacacgtgcaagtcgaacgaagcactgaaatggatttcttcggaatgatggggcggggaccgagtggcggacgggtgagtaacacgtgagcaaccggccgtgcagagcgggagagcagtgggaaacggcggagaataccgcatgacatgtgttctccgcatgaggaaaacatcaaatgattcttcgctgaaagatgggctcgcgtccgattaggtagttggtgaggcaacggctcaccaagccgacgatcggtagccggactgcaaggtcgatcgcccccattgggactgggacacggcccaggcgcctacgggaggcagcagtgggggatattgcacaatgggcgcaagcctgatgcagcaacgccgcgtgggggaggacggtcttcggattgtaaacctctgtccttggggaagaaacaaatgacggtacccttggaggaagccac

SEQ ID NO: 5085 - DNA, 490 bp, Unknown
  Ascusbbf_1436385, encodes 16S rRNA
agagtttgatcatggctcaggatgaacgctagcggcaggcttaacacatgcaagtcgaggggtaacgcggggtagcaatactctggcgacgaccggcgcacgggtgcgtaacgcgtatgcaacctacctgtaacaggggtataacggagagaaatttccactaatcccccatattgttagagattcgcatgtttctctaacgaaagcttcggtggttacggatgggcatgcgtgacattagctagttggtaaggtaacgacttaccaaggcgacgatgtctaggggagctgaaaggcttatcccacaggaaggtacagaggcacggaccagactcgtgcgggaggcagggggaatgaagatgagtggatggacggaagtctgagccaggcaggccgcgtggaggaagaaggtgctatgggatgtaaactccttttgttcgagagtaataagaggcttgcgagcctcgatgagagtatcggacgaataagc

SEQ ID NO: 5086 - DNA, 490 bp, Unknown
  Ascusbbf_1321568, encodes 16S rRNA
agagtttgatcctggctcaggatgaacgctagcggcaggcttaacacatgcaagtcgaggggtaacgcggggtagcaatcctctggcgacgaccggcgcacgggtgcgtaacgcgtatgcaacctacctgtaacaggggtataacggagagaaattttcactaatcctccatattgcttgagattcgcatgtttctctaacgaaatcttcggtggttacggatggacttgcgtgactttggctggttggtaaggtaacgacctaccaaggcgacgatttctaggggggctgagaggcttatcccccagactggtactgggccacggaccagactccgccgggaggcagcagtgaggaataatggtcaatggacggaagtctgaaccagccatgccgcgtggaggaagaaggtcctatgggttgtaaactccttctgttcgagagtaataagaggcttgcgagcctcgatgagagtatcggacgaataagc

SEQ ID NO: 5087 - DNA, 490 bp, Unknown
  Ascusbbf_1371565, encodes 16S rRNA
agcgtttgatcatggctcaggatgaacgctagcggcaggcttaacacatgcaagtcgaggggtaacgcggggtagcaatactctggcgacgaccggcgcacgggtgcgtaacgcgtatgcaacctacctgtaacaggggtataacggagagaaatttccactaatcccccatattgttagagattcgcatgtttctctcacgaaatcttcggtggttactgatgggcttgcgtcacattagctagttggtacggtaacggcttaccatggcgacgatgtctaggtgagctgaaaggcttatcccctaaactggtactgagacacggaccagactcctacgggaggcagcagtgagaaatagtggtcaatggacggaagtctgaaccagccatgccgcgtggaggaagaaggtcctatgggtggtaaactccttgtgttcgagagtaataagaggcttgcgagcctcgatgagagtatcggacgaataagc

SEQ ID NO: 5088 - DNA, 486 bp, Unknown
  Ascusbbf_1371609, encodes 16S rRNA
agagtttgatcctggctcagaacgaacgctggctgcaggtcttaggcatgcacgtcgaacggacgacagagtggcttgtcattctgaagttagtggcgcacgagtgagtaacgcgtgggaaactgcccttcactggggaataacgtctggaaacggacgctaataccgcatactcccgcaaggggaaagatttatagttgatggatttgcccgcgttgcattagcttgttggtgggttaatttcctaccaaggcgatgatccatagctggtctgagaggccgagaatccacgctgaaactgagacacggtccagactcctacgggaggcagcagctaagaatattgggcaatggaggaaacgctgacccagacatgccgcgtgaatgaagaaggccttcgggttgtaaagttcttttagtcatgaagatgatgacagtagtgacagaaaaagcaccggctaacttcgtgccagcagccgcggtaat

SEQ ID NO: 5089 - DNA, 490 bp, Unknown
  Ascusbbf_1436552, encodes 16S rRNA
agagtttgatcatggctcagaacgaacgctggcggcgcgctttaagcatgcaagtcgagcggcaaggacttcggtccccagagcggcggacgggtgagtcacacgtggataatctgccctgcagtctggaataccccatggaaacatgggctaatgccggatgcgagatggaggcgatggtctttatgggaaagctcccacgggagcgctgcaggatgagtccgcggccgattagctagatggcggggtaagggcccaccatggcgacgatgggtagccggcctgagagggtggtcggccgcataggaacggagtaacggacgggacaactacggaaggcagccgctagggatcattcacgatgaacggaagtctgattgagcgaggccgggtgggcgatggaggccggaaggttggatagtacattgatggagggagaagaaccgcttcagggaatgggagcggtaggacgtgaatccatgaataagcc

SEQ ID NO: 5090 - DNA, 490 bp, Unknown
  Ascusbbf_1371562, encodes 16S rRNA
agagtttgatcctggctcaggacgaacgctggcggcatgcttaacacatgcaagtcgaacggactgattccttcgggatgaaagttagtggcgaacgggtgagtaatgtatgagcaacctgcctctgtcaacgggataacagttggaaacgactgctaatacggtataagaccacggcaccgcatggtgcggcggtaaaagattgttcggacagagaggggctcacataccattagcgagtgggtgagataatagcccaccaaggcgacgatgggtagccgagctgagcggctgatcggcacaatggggactgaaacacggccccgcctcctacggcaggcagcaatggggaatattgggcaatggaggaaactctgacccagccatgccgcgtgagcgatgaaggtaattttattgtaaagctcttttctcaggaacgaataaagatgacggtgcctgaggaataagccccggctaactacgtgccagc

SEQ ID NO: 5091 - DNA, 486 bp, Unknown
  Ascusbbf_1321616, encodes 16S rRNA
agagtttgatcctggctcagaacgaacgctggcggcagggctgaggcatgcaagtcgaacggacgacagagtggcttgccattctgaagttagtggcgcacgagtgagtaacgcgtgggaaacggcccttcactggggaagaacgtcgggaaacggacgctaagaccgcagacgcccgcaaggggaaagagctaccggggatggaggggcccgcgtgggattagcttgtggggggggtaagggcctaccaaggcgaggatccatagctggtctgagaggacgatcagccacgctggaacggagccacggtccagcctcctccgggcggccgctgctccgactcttgggcactggaggacactctgcccccgccctgccgcgtgaatgaagccggccttcgggttgtaaagttcttttagtcatgaagatgatgacagtagtgccagaacaagccccggctaacttcgtgccagcagccgcggtaat

SEQ ID NO: 5092 - DNA, 486 bp, Unknown
  Ascusbbf_1371511, encodes 16S rRNA
agagtttgatcctgactcagaacgaacgctggcggcaggtcttaggcatgcaagtcgaacggacgccagagtggcttgccattctgaagatggtggcgcacgcgtgagtaacgcgtgggaaactacccttccctggggaataacgtctggcaacgaacgctaataccgcatccgcccgccatgggaaagatttaccggagtggagtgggccggcgttggattggcatgttggtggggtaatggcataccaaggcgatgatccatacctggtctgggaggacgatcagccacgctggaactacggcagggtgcagactccaacggtaggcagcggctaagagcatggggcaacggagtaacgtgcgagacggcgaggccgtgtgaaggaagctggccttagagttggaaagttcttgtagtcatgcagatgatgacagtagtgacagaaaaagcaccggctaacttcgtgccagcagccgcggtaat

SEQ ID NO: 5093 - DNA, 490 bp, Unknown
  Ascusbbf_1341398, encodes 16S rRNA
agagtttgatcctggctcaggatgaacgctagctacaggcttaacacatgcaagtcgaggggcatcataacgaaagcttgcttttgttgatggcgaccggcgcacgggtgagtaacgcgtatccaaccttccccttagtagtgcatagcccggcgaaagtctgattaataccctatggtttcctttgatgacctctgaagtggaacaaagatttatcgctaagggatggggattcgtctgattagtttgttggcggggtaacggcccaccaaaccaacgatcagtctgggttcttaaacgaaagccaccccaaatgggtactggacaagggaccaacctcctcaggggggaagaagtgaggaatattggtcaatggcggagagcctgaaccagccaagtagagtgaaggatgacggccctatgggctgtaaactgtttttgcatgggaataaagtgagggacgtgtccctttttgtatgtaccatgagaa

SEQ ID NO: 5094 - DNA, 490 bp, Unknown
  Ascusbbf_1436380, encodes 16S rRNA
agagtttgatcatggctcaggatgaacgctagctacaggcttaacacatgcaagtcgaggggcagcatgacgattgcttgcaattgttgatggcgaccggcgcacgggtgagtaacgcgtatccaaccttccctatagtagagaatagcccggcgaaagtcggattaatgctctatgttcttctttgatggcatctgacgagaagcaacggttcacctctagaggattgggatgcgtctgattagcttgttggcggggtaacgacccgccaaggcaacgatcagtggtggttatgagaggaaggtcaccaacattggaactgagacacggtccaaactcctacgggaggcagcagtgaggaatattggtcaatgggcgagagcctgaaccagccaagtagcgtgaaggatgaaggttctatgggttgtaaacttcttttgtacggggataaagagagccacgtgtagcttcttgcaagtatcggacgaat

SEQ ID NO: 5095 - DNA, 490 bp, Unknown
  Ascusbbf_1341323, encodes 16S rRNA
agagtttgatcctggctcaggatgaacgctggcggcgtgcttaacacatgcaagtcgaacggagttatctctctgagtatagcttgctcaaatcttgagataacttagtgtcggacgggtgagcaacgcgtggataacctgccttatactgggggataacacttagaaataggtgctaataccgcataagttcacgttcccgcatgggaaactgtgaaaaactccggtggtgtaagattggtccgcgtctgattaggtagttggtgaggtaacggccaaccaagtcaacgatcagtagccgacctgagagggcgaacgacaacattgggactgagacacggcacaaacgcctacgggaggaagcagtggggaatattgcacaaggggggaaaccctgatgcagcggcgccgcgtgagtgaagaagtatttcggtatgtaaagctctatcagcaaggaagaaaaaaatgacggtacttgactaagaagccc

SEQ ID NO: 5096 - DNA, 486 bp, Unknown
  Ascusbbf_1435851, encodes 16S rRNA
agagtttgatcatggctcagaacgaacgctggcggcaggtcttaggcatgcaagtcgaacggacgacagagtggcttgccattctcaagttagtggcgcacgagtgagtaacgcgcgggaaactgcccttcactggggaataacgtctggaaacggacgctaataccgcatacgcccgcaaggggaacgatttatcggtgacagatgtgcccgcgtgggattagtgtgttgggggggtaatggcctaccaaggcgatgaaccatatctggtctgagaggacgatcagccacgctggaactgagacacggaccaggcccctacgggaggcagcagctaagaatagtgggcaatggaggaaactctgacccagccatgccgcgtgaatgaagaaggcctgcgggttgtaaagttctagtagtcatgaagatgatgacagtagtggcagaaaaagcaccggctaacttcgtgccagcagccgcggtaat

SEQ ID NO: 5097 - DNA, 490 bp, Unknown
  Ascusbbf_1435736, encodes 16S rRNA
agagtttgatcatggctcaggatgaacgctagcggcaggcttaacacatgcaagtcgaggggcagcgcggggtagcaatactctggcggcggccggcggacgggcgcgtaacgtgtgagcaacttgcccgtccctgggcggtagacactggaaacggtgtgtaatactccataacatatggattcacacgcatttatattaaatgattcgttggtgatggatgtgctcccgttacgtgatagaatgtgcgggttatgagccccccccagatacgatgtttaggggttttgagaggaaggtgctccaaactggaaatgtgacacggtccagactcttacgggaggaggcagtgaggaatattggtcaatgggcgaaagcctgaaccagccaagccgcgtgcaggaataaggccctatgggtcgtaaactgcttgtgcttgagggcaataaaggtaacgtgtggcccgatgagagtatcaggggaataagca

SEQ ID NO: 5098 - DNA, 484 bp, Unknown
  Ascusbbf_1371943, encodes 16S rRNA
agagtttgatcatggctcagaacgaacgctggcggcaggtcttaggcatgcaagtcgaacggacgacagagtggcttgccattctgaagttagtggcgcacgagtgagtaacgcgtgggaaactgcccttcactggggaataacgtctggaaacggacgctaataccgcatacgcccgcaaggggaaagatttatcggtgatgggtgtgcccgcgttggattagcttgttggtggggtaatggcctaccaaggcgatgatccatagctggtctgagaggacgatcagccacgctggaacggagcaacggccccgactcctacgggaggcagaagcaaggaatattgggcaatggaggaagctcggaccaagccatgccgcgtgaatgaagaaggccttcgggttgtaaagttcttttagtaatgaagatgatgacagtagtgacagaaaacgcaccggctaactgcgggcaagcagccgcggta

SEQ ID NO: 5099 - DNA, 490 bp, Unknown
  Ascusbbf_1371951, encodes 16S rRNA
agagtttgatcctggctcaggatgaacgctagctacaggcttaacacatgcaagtcgaggggcagcataacgaaagcttgcttttgttgatggcgaccggcgcacgggtgagtaacgcgtatccaaccttccccttagtaggcaaagccccggcgaaagcgggttaataccctatttttttccgtgagggcctccgaagggggataaagatttttcgcctaaggatgggggtgcgtgtgattgggttggtgggggggaaaccgcccaccaagccatcgataagtaggggttctgggggggaggtcccccacatgggtactgagacacggaccaaactcctacgggaggcagcagtgaggaatattggtcaatgggcgagagcctgaaccagccaagtagcgtgcaggatgacggccctatgggttgtaaactgcttttgcatgggaataaagtgagggacgtgtccctttttgtatgtaccatgagaata

SEQ ID NO: 5100 - DNA, 490 bp, Unknown
  Ascusbbf_1321794, encodes 16S rRNA
agagtttgatcctggctcaggataaacgctggcggcacacataagacatgcaagtcgaacggacttaactcattcttaacgattgagagcggttagtggcggactggtgagtaatgtataagtaccctgcctatcagaggtgaacaacagttggaaacgactgctaataccgcatatgccacgagaatcacatggttcaagtgggaaaggagcaatccgcttatcgattgacgtatatctgattagctagttggtggggtaacggcctaccaaggagacgatcagtagccggactgggaggttaaacgacgacattgggactgagagacggcccagactagtaagagaggcagcaggcgggaagattgagcaatggaggaaacgctgacgcagtgacgccgcgggcaggaagaaggttttcggattgtaaactgctttagacagggaagaaaaaagacagtacctgtagaataagctccggctaactacg

SEQ ID NO: 5101 - DNA, 490 bp, Unknown
  Ascusbbf_1343951, encodes 16S rRNA
agagtttgatcatggctcaggacgaacgctggcggcgtgcttcatacatgcaagtcgaacgagaagctctagcttgctagagtggaaagtggcggacgggtgagtaatatgtaggaaatctgccctagagagggggacaacagagggaaacttctgctaataccccatatgagcttggttgcaataccaatcttgaaaactccggtgctctaggatgagcctgcatctgattagcttgttggtggtgtaatggactaccaaggcgacgatcagtagctggtttgagaggatgatcagccaacatgggacggggacacgcccattactactacggaaggcggcagtagggcattttgcgcaatgggcgaaagcctgacgcagcaacgcggcgggaatgatgaagcccttcggggtgtaaaagtctgtcagtggggacgaattttgacggtacccacagaggaagcaccggctaactccgtgccagcagccg

SEQ ID NO: 5102 - DNA, 490 bp, Unknown
  Ascusbbf_1321809, encodes 16S rRNA
agagtttgatcctggctcagaacgaacgctggcggcatgcttaacacatgcaagtcggacgggaatcgattgatagctttctattgattgagcagagtagtgcacggttgattaacacgtgggtacataccttatagtggggatcacaattggaaacgattgataataccgcatacgtcctaagggagaaaggcgcaattcgctataagagtggcccgcggaatatcaggatgttggtggggtaaaggcctaccaaacctacgccctatagctggtctgagaggacgatcagccacattaggactgagaagcggcccaaactcctacgcgaggcggcagtgaggaatattgggcaatgggggcaaccctgacccagccatgccgcgtgagtgaagaaggttttcgaattgtaaagctctttcggatgtgaagatgatgacggtagcatctaaagaagccccggcaaacttcgtgccagcagccgcggtaa

SEQ ID NO: 5103 - DNA, 365 bp, Unknown
  Ascusbbf_1321808, encodes 16S rRNA
agagtttgatcctggctcagattgaacgctggcggcaggcctaacacatgcaagtcgagcggatgaggggagcttgctccctgattcagcggcggacgggtgagtaatgcctaggaatctgcctggtagtgggggacaacgtttcgaaaggaacgctaatacctcaaacgtcctacgggagaaagcagggggccttcgggccttgcgctagcagatgagccaaggtcggattggctagttgatgaggtactggcgctcctaaagcacgataagttgggaggaagggttgtaacctaataagttgcaattttgacgttaccgacagaataagcaccggctaacttcgtgccagcagccgcggtaat

SEQ ID NO: 5104 - DNA, 490 bp, Unknown
  Ascusbbf_1371874, encodes 16S rRNA
agagtttgatcctggctcaggatgaacgctcgctccaggcttaacacatgcaagtcgaggggcagcataacgaaagcttgcttttgttgatggcgaccgtcgcacgggtgagtaacgcgtatccacccttccccttagtagggcatagcccggcgaaagtcggattaataccctatgttttccgttgaggccatctgaagtggcataaacatttatcgctaagggatggggatgcgtctgattaggttgttggcggggtaacggcccaccaagccatcgatcagtaggggttctgagagtacgatcctcacaattggaactgagacacgggccagactcatacgggaggcagcagtgaggaatagtgggaaatggagggaactctgacacagccatgccgcgtgagtgaagaaggttttcggattgtaaagctctttcagacgggaagatgatgacggtaccgtcagaagaagcaccggctaacttcgtg

SEQ ID NO: 5105 - DNA, 371 bp, Unknown
  Ascusbbf_1343667, encodes 16S rRNA
agagtttgatcctggctcagagtgaacgctggcggcaggcctaacacatgcaagtcgaacggcagcacaggagagcttgctctctgggtggcgagtggcggacgggtgaggaatacatcggaatctgcctattcgtgggggataacgtagggaaacttacgctaataccgcatacgtcctacgggagaaagcgggggatcgcaagacctcgcgcgggtagatgcgccgatgtcagattagctggttgacggggtaatggcgcttgaaagcgacttttgttagctgagaagtcctgccgattaatactcggcggggatgacggtacccaaagaataagcaccggctaacttcgtgccagcagccgcggtaat

SEQ ID NO: 5106 - DNA, 490 bp, Unknown
  Ascusbbf_1435701, encodes 16S rRNA
agagtttgatcatggctcaggacgaacgctggcggcgtgcttaatacatgcaagtcgaacgaggtccaccctttcgcacgattggggaagacctagtggcgaacgggtgcgtaacacgtgagaaacctgccccggtctctggaataccaagtggaaacacttgctactcccgtatgccgtctgccccccgcatagtggattgacgaaagatttataggctcgggagggtctcgcggccatttagcttgttggcgaggtagcggcccaccaaggcatcgaccggtagctgttctgagaggatagtcagcccacctgggacacgaacacgacccagactcctacgtggggaagcagtagggaatcttgcacaatgggcgaaagcctgatgcagcaacgccgcgggcgggaagaaggccttagggtggtaaaccgctttcagcagggaagaaaatgacggtacctacagaagaaggtgcggccaactacgtgc

SEQ ID NO: 5107 - DNA, 486 bp, Unknown
  Ascusbbf_1435716, encodes 16S rRNA
agagtttgatcctggctcagaacgaacgctggctacaggtcttaggcatgcaagtcgaacggacgacagagtggcttttcattctgttgatagcggcgcacgagcgagtaacgcgtgggaaactgcccttcactaggctacaacgtctggcaacggacgtcaatatcgtactctctcgcctgggatacgatttaccggttatggatgtccctgggtcggtttagcttgttggtgcggtaattgcctatcatggcgatgatccacacctggtatggaaggacgatcagccactctggaacttggacacggaccagagtcgtacgggaggcagcagctaagagtattaggcaatggaggaaactctgacacagccacgccgcgggaaggaagaaggccttagagttgtaaagttctattagtgatgaagatgatgacagtagtgacagaaaaagcaccggctaacttcgtgccagcagccgcggtaat

SEQ ID NO: 5108 - DNA, 472 bp, Unknown
  Ascusbbf_1321804, encodes 16S rRNA
agagtttgatcctggctcagagcgaacgctggcggcatgcttaacacatgcaagtcgcacgaaggtttcggccttagtggcggacgggtgagtaacgcgtaggaatctatccatgggcgggggctaactctgggaaactggagctaataccgcctgatacctgagggtcaacggcgcaagtcgcctgtggaggggcgggcgttcggttagcttgtttgtggggtaatggcctaccaaggcgaggatcgataactggtctgagaggatgatcagccacactaggactgggacacggcccagactcctacggggggcaacaggggggaatattggacaatggggtcaaccctggtccagcaatgccacgggtgtgaagaaggttttcggattgtaaagcactgtcggcgggggcgatgatgacggtacccgcagaagaagcaccggctaactccgtgccagcagccgcggtaat

SEQ ID NO: 5109 - DNA, 486 bp, Unknown
  Ascusbbf_1435816, encodes 16S rRNA
agagtttgatcatggctcagaacgaacgctggcggcaggtcttaggcatgcaagtcgaacggacgacagagtggctttccattctgacgttagtggcgcacgagtgagtaacgcgtgtgaaactgtccttcactggggaataacgtctggcaacggtcgctattaccgcatacgcccgcaaggggaaagatttatcggcgacggatgcgcgcgcgttggattagcttcttggtgggttaagggcgtaccaaggggatgatccatagctggtctgagaggacgatcagctacgctggaactgagacacgggccggacagctacgggaggcagcagctacgaatattgggcaatggaggagactctaacccagccatgccgcgtgaatgaagaaggccttcgaggtagaaagttcttatagtcatgaagatgatgacagtagtgacagaaaaagcaccggctaacttcgtgccagcagccgcggtaat

SEQ ID NO: 5110 - DNA, 490 bp, Unknown
  Ascusbbf_1435822, encodes 16S rRNA
agagtttgatcatggctcaggatgaacgctagcggcaggcttaacacatgcaagtcgaggggtaacgcggggtagcaatactctggcgacgaccggcgcacgggtgcgtaacgcgtatgcaacctacctgtcacaggggtataacggagagaaatttccactaatcccccatattgttattctttcgcatgttaggataacgaaagcttcggtggttacggatgggcatgcgtgacattagctagttggtaaggtaacggcttaccaaggcgacgatgtctaggggagctggggggcttatagcccaaacgggtaagtcgacacgaaccggacggcgacggggggcagaagggaggaagagtggtcaatggacggaagtctgaaccagccatgccgcgtggaggaagaaggtcctatgggtaggaaactcctttggttcgagagtaataagaggcttgcgagcctcgatgagagtatcggacgaataagc

SEQ ID NO: 5111 - DNA, 490 bp, Unknown
  Ascusbbf_1344004, encodes 16S rRNA
agagtttgatcctggctcaggatgaacgctggcggcgtgcctaacacatgcaagtcgaacggaaaggattcttcggaattccttcagtggcggacgggtgagtaacgcgtgggtaacctgtcccatacaggggaacaacagctggaaacggctgctaataccgcataagcgcacagtactgcatggtacagtgtgaaaagattttatcggtatgggatggacccgcgtctgataagaaagttggaggggtaacggcccaccaaggcgacgttcagtagccgacctgagagggtgaccggcgacaaagggactgggcaacggcccaaactcctacggggggcagcagtgggggatatgacacaatgggcgaaagcctgatgcagcgacgccgcgtgggggaggaagtatttcggtatgtaaagcgctatcagcagggaagaaaatgacggtacctgactaagaagccccggctaactacgtgccagcagcc

SEQ ID NO: 5112 - DNA, 486 bp, Unknown
  Ascusbbf_1372136, encodes 16S rRNA
agagtttgatcatggctcagaacgaacgctggcggcaggtcttagacatgcaagtcgaacggccgacagagtggcttgccattctgaagctagtggcgcacgagtgagtaactcgtgcgaaactacccttcactggggaataacgtcgggcaacggacgctaataccgcatacgcccgcaaggggaaatgtctatcggttatggatatgccgtcgttgcattagcgtgttgatgggaaaagttcgtaccacggcgaggatgcatacctggtctgggaggacgatcagccacgatggaactacgacagggaccagtgtggtacatgggtcagcagctaagaatatgaggcaatggagtagcgtctgacacggcggtgccgcgggaaggaagaaggctttctgcttgtaaagatcttttggtgatgcagatgatgacagtagtgaaagaaaaaggaccggctaactccgtgccagcagccgcggtaat

SEQ ID NO: 5113 - DNA, 490 bp, Unknown
  Ascusbbf_1343852, encodes 16S rRNA
agagttgatcctggctcaggatgaacgctggcggcgtgcttaacacatgcaagtcgaacggagttatctcgcttaggagggcttgctcaaatcttgatagaacttagtggcggtcgggtgagtaccgcgtggctaacctgccttatactggggtttaacacttagatataggtgctaataccgcataagcgcacgttcccgcatgggaaagtgtgatagtctccggtggtgtaagatggatgagcgtctgattagatagtgtgtgcgtaaccgccccaccaagtcaacgatcagtagccggccagagggggtgaacgaccacattgggactgcgaaacggcgcaaactcctacgggaggcagcagtggggaatagtgcacaatgggggaaaccctgatgcagcgacgccgcgtgagtgaagaagtagttcggtatgtaaagctctatcagcaaggaagaaaaaaatgacggtacttgactaagaagcacc

SEQ ID NO: 5114 - DNA, 490 bp, Unknown
  Ascusbbf_1344013, encodes 16S rRNA
agagtttgatcatggctcaggatgaacgctggcgtcgtgcctaacacatgcaagtcgaacggaaagaattcttcggaattctttcagtggcggacgggtgagtaacgcgtgggtaacctgccccatacaggggaacaacagcttgaaacggctgctaataccgcataagcgcacagtactgcatggtacagtgtgaaaagattttatcgctatgggatggacccgcggaggattagctagttggaggggtaacggcccaccaaggcgacgatcagtagccgacctgagagggtgaccggcaacattgggactgagacagggcacaaagacctacgggaggcagcggtggggggtattggacaatgggcgaaagtctgatgcagcgacgcggcgtgagtgaggaagtatttcggtatgtaaagctctatcagcagggaagaaaatgacggtacctgactaagaagccccggctaactacgtgccagcagcc

SEQ ID NO: 5115 - DNA, 342 bp, Unknown
  Ascusbbf_1372302, encodes 16S rRNA
agagtttgatcatggctcaggatgaacgctagcggcaggcttaacacatgcaagtcgaggggtaacgcggggtagcaatactctggcgacgaccggcgcacgggtgcgtaacgcgtatgcaacctacctgtaacaggggtataacggagagaaatttccactaatcccccatattgttattctttcgcatgttaggataacgaaagcttcggtggttacggatgggcatgcgtgacgttagctagttggtaaggtaacgagttaaaaaggcgctttgcgctaccggatgagagtatcggacgaataagcatcggctaactccgtgccagcagccgcggtaat

SEQ ID NO: 5116 - DNA, 486 bp, Unknown
  Ascusbbf_1321963, encodes 16S rRNA
agagtttgatcctggctcagaacgaacgctggcggcaggtcttaggcatgcgagtcgaacggacgacagagtggcttgccattctgaagttagtggcgcacgagtgagtaacgcgtgggaaactgcccttcactggggaataacgtctggaaacggacgctaataccgcatacgccctcaaggggaaagatttatcggttatggttctacccgcgtgggattagcttgttggtgggggaatggcctaccaatgggatgatccctagcttgtctgtgagtacgatcagcctcgcgggaactgagacacggtccagacgcctacgggaggcagcagctaagaatattgggcaatggaggaaactctgacccagccatgccgcgtgaatgaagaaggccttcgggttgtaaagttcttttagtcatgaagatgatgacagtagtgacagaaaaagcaccggctaacttcgtgccagcagccgcggtaat

SEQ ID NO: 5117 - DNA, 490 bp, Unknown
  Ascusbbf_1372283, encodes 16S rRNA
agagtttgatcctggctcaggatgaacgctagcgacaggcctaacacatgcaagtcgaggggcagcaggggagcaatcccgctggcgaccggcgcacgggtgagtaacgcgtatgtaacctgcccatgagtgggggatagcccagcgaaagctggattaataccgcatgaaaccgtttgaagacatctgataatggttaaagatttattgctcatggatggacatgcgtccgattagctagttggcggggcaacggcccaccaaggcgacgatcggtaggggttctgagaggaaggtcccccaaagtgggagcgggaaaacgaacaaactgcgaagggggggaggaaggaagaaagatgggacaatgggaggaagcagaacccagccaagtccggagaaggatgagggtattatgttgtgaaaacttctttagcggtggagtaataggggggtggagacaacgaaggcaagaacactagaaataggggtc

SEQ ID NO: 5118 - DNA, 490 bp, Unknown
  Ascusbbf_1321956, encodes 16S rRNA
agagtttgatcctggctcaggatgaacgctagcggcaggcttaacacatgcaagtcgaggggcagcgcggggtagcactactctggcggcgaccggcggaagggtgcgtaacgcgtgagcaacatgcccgtggcagggggataagcgatggcaacgtcgtctaagaccccgtcacaacagacctcgcatggggtttgtttgaaagcttcggcggccacggatttgctcgcgtcccattaggcagtgggcggggtaacggcccaccaaaccgacgatgggtaggggttcggagaggaaggtaccgtacagtggaactgaggcaccgtccagaatcggacggcaggcagcggggaggaagattggtcgatgggcggaagcctgaaccagccatgcagcgtgcaggaataaggcccgacgggtcgtaaactgcttttggacgggagcaataagggtcaagagtggcctgatgagggtaccgtacgaataagca

SEQ ID NO: 5119 - DNA, 490 bp, Unknown
  Ascusbbf_1344054, encodes 16S rRNA
agagtttgatcctggctcaggatgaacgctagcggcaggcttaacacatgcaagtcgaggggtaacgcggggtagcaatactctggcgacgaccggcgcacgggtgcgtaacgcgtatgcaacctacctgtaacaggggtataacggagagaaatttccactaatcccccagattgttattctttcgcatgttaggataacgaaagcttcggttgttacggaagggcatgcgtgacaatagctagttggtaaggtaacggcttaccaaggagacgatgtctaggggagctgagaggcttatcctccacactggtactgagaaccgaaacagactccgacgggaggcagaagcgcggaatattggcaactggacggaagactgaacaagcgaggccgcgtggaggaggaaggtccgaggggttgtaaactgcttttgttcgagagtaataagggctttgcgaagcacgatgagagtatcggacgaataagc

SEQ ID NO: 5120 - DNA, 490 bp, Unknown
  Ascusbbf_1435669, encodes 16S rRNA
agagtttgtcatggctcaggatgaacgctagctacaggcttaacacatgtaagtcgagggggagaagaacgaaagggggcggggggggcgggagaacggggcacgggtgagtaacgcgtatccaaccttccccttagtagggcatagcccggcgaaagtcggattaataccctatgttttccgttgaggacatctgaagtggaacaaagatttatcgctaagggatggggatgcgtctgattaggtggttggcggggtaacggcccaccaagccatcgatcagtaggggttctgagaggaaggtcccccacataggtcctgagacacggcccaaactcctacggggggcagcagtgaggaatattggtcaatgggcgagagcctgaaccagccaagtagcgtgcaggatgacggccctatgggttgtaaactgcttttgcatgggaataaagtgagggacgtgtccctttttgtatgtaccatgagaata

SEQ ID NO: 5121 - DNA, 490 bp, Unknown
  Ascusbbf_1341639, encodes 16S rRNA
agagtttgatcctggctcaggacgaacgctggcagcatgcttaacacatgcaagtcgaacggactgattccttcgggttgacctttcgtggcgaacgggtgagtaatgtatgatcaacctgcctctgtcaacgtgctaacagttggaaacgcctgctaatacggtatacgaccacggcaccgcatggtgctgcggtaaacgatgtttcggacagagatgggctcatatcccattagctggttgggaagataatagcccaccaaggcgacgctgggtagccgagttgagaggctgatcggccacatagggactgacagacggcccagagtcctacgggaggcagcagtggggaagagtgggcaatggaggaaactctgacaaagcaatgccgcgtgagcgatgaaggtaagtttattgtaaagctcgtttctaaggaacgaataaagatgacggtaccggaggaataagccccggctaactacgtgccagc

SEQ ID NO: 5122 - DNA, 490 bp, Unknown
  Ascusbbf_1341642, encodes 16S rRNA
agagtttgatcctggctcaggacgaacgctggcagcatgcttaacacatgcaagtcgaacggactgattccttcgggttgacagttagtggcgaacgggtgagtaatgtatgagcaacctgcctctgtcaacgtgataacagttggaaacgactgctaatacggtataagaccacggccccgcatggtgctgcggtaaaagctttttcggacagagatgggctcatatcacattagctcgtgggtgggataatggcccaccaaggcgacggtgggtagccgcgttgagaggctgatcggcaacaatgggactgaaacacggcccagactcctacgggaggcagcaggggggaatagtgggcaatggaggaaagtctgacaaagcaatgccgcgtgagcgatgaaggtaagtttatgggaaagctcgtttcgaaggaacgaataaagatgacggtaccggaggaataagccccggctaactacgtgccagc

SEQ ID NO: 5123 - DNA, 490 bp, Unknown
  Ascusbbf_1341630, encodes 16S rRNA
agagtttgatcctggctcaggatgaacgctggcggcgtgcttaacacatgcaagtcgaacggagttatctcgctgaggagagcttgctcaaatcttgagataacttagtggcggacgggtgagtaacgcgtggataacctgccttataccgggggataacacttagaaataggtgctaataccgcataagcgcacgatcccgcatgggaaagtgtgaacaactccggtggtataagatggatccgcgtttgattagatagttggggaggtaagggcccaccaagtcaacgatcagtagccgacataagtgggagagcgacaacattgggactgagacacggcccaaaagcctacgggagggagaagtggggaagattgcgaaatgggggaaaacctgatgcagcgacgccgcgtgagggaagaagtatttcggtatgtaaagctctatcagcaaggaagaaaaaaatgacggtacttgactaagaagccc

SEQ ID NO: 5124 - DNA, 490 bp, Unknown
  Ascusbbf_1371799, encodes 16S rRNA
agagtttgatcatggctcaggatgaacgctagcggcaggcttaacacatgcaagtcgaggggtaacgcggggtagcactactctggcgacgaccggggcacgggtgcgtaacgcgtatgcaacctacctgtaacaggggtataacggagagaaatttccactaatcccccatatcgttattctttcgcatgttaggataacgaaagcttcggttgttacggatgggcatgcgtgacattagctagttggtaaggtaacggcttaccaaggcgacgatgtctaggggagctgagaggcttatcccacaaacgggtacggagacacggaccagaatcctacggggggcagcagtgaggaatagtggacaatggacggaagtgtgaaccagccatgcagcgtggaggaagaaggtcctatgggtggtaaactccttttgttcgagagtaagaagaggagtgcgagcaccgatgagagtatcggacgaataagc

SEQ ID NO: 5125 - DNA, 490 bp, Unknown
  Ascusbbf_1341641, encodes 16S rRNA
agatttgatcatggctcaggatgaacgctagctacaggcttaacacatgcaagtcgaggggaaacgatattgaaagcttgctttcgataggcgtcgaccggcgcacgggtgagtaactcgtatccaacctgcctggaaatagggactaatccgtggaaacgcggcctaatgtcctatgtgctccgaagaggacatctgatttggagtaaagattcatcgtttccggatggggatgcgtctgattagcttgctggcggggtaacggcccaccagggcgacgatcagtaggggttctgcgaggaaggccccgagcagtggaactgagagacggtccaaaagcctacgggaggcagcagtgaggaagattggtcaatggacgagagtctgaaccagccaaggagcgtgaaggaggacggccctatgggttgtaaactgcttttatgcggggataaagtgcgcaacgtgtggtgtattgcaggtaccgcaagaa

SEQ ID NO: 5126 - DNA, 490 bp, Unknown
  Ascusbbf_1436139, encodes 16S rRNA
agagtttgatcatggctcaggatgaacgctagcggcaggcttaatacatgcaagtcgaggggtaacgcggggtagcaatactctggcgacgcccggcccccgggtgcgtaacgcgtttgcaacctccctgtaacaggggtataacggagagaaatttccactaatcccccatattttttttctttcccatgttaggataacaaaagctccgttgtttacggatggccaggcgtcacattagtgatttgttaaggtaacgccttaccaaggcgaggttggcatggggagctgagaggcttatcccccacactggtacggagacacggaccagactcctacgggaggcagcagtgaggaatattggtcaatggacggaagtctgaaccagccatgccgcgtggaggaagaaggtcctatgggttgtaaactccttttgttcgagagtaataagaggcttgcgagcctcgatgagagtatcggacgaataagc

SEQ ID NO: 5127 - DNA, 490 bp, Unknown
  Ascusbbf_1371453, encodes 16S rRNA
agagtttgatcatggctcaggatgaacgctagctacaggcttaacacatgcaagtcgaggggcagcagatcgaaagcttgcttttgatgctggcgaccggcgcacgggtgagtaacgcgtatccaaccttccctatagtagaggatagcccggcgaaagtcggattaatactctatgttgtatttcgaggacatctgaagaataccaaaggtttaccgctataggatggggatgcgtctgattaggttgttggcggggtaacggcccaccaagcccacgatcagtaggggttctgagaggaacggcgccaagatcgagactgcgacggggcgcagacgcctacgagaggcagcagtcgggagtattgcgaaatggaggaaaagcggacggagtgacgccgcgtgcaggaggaaggtgctcggattgtaagctgcagtagagagggaagaaaaaaatgacggtacctattgaataagcaccggctaactac

SEQ ID NO: 5128 - DNA, 490 bp, Unknown
  Ascusbbf_1436175, encodes 16S rRNA
agagtttgatcctggctcaggatgaacgctagctgcaggcttaacacatgcaagtcgaggggcaacgtggggtagccatactctggcgacgaccggcccacgggtgcgtaacgcgtatgcaacctacctttcacaggggtataacggagcgaaatttccactaatcccccctctttttattctttcgcatgcaaggataacgaaagcttcggtggttacggatgggcatgcgtgactttagttagttggtaggttaacggcataccaaggcgacgatgtctaggggagcttagaggcttatcccccacactggaactgagacacggaccagactcctacgggaggcagcagtgaggaatattggtcaatggacggaagtctgaaccagccatgccgcgtggaggaagaaggtcctatgggttgtaaactgcttttgttcgggagtaataagagctatgcgaagcccgatgtgggtatcggacgaataagc

SEQ ID NO: 5129 - DNA, 490 bp, Unknown
  Ascusbbf_1341565, encodes 16S rRNA
agagtttgatcctggctcagagcgaacgctagcggaatgctttatacatgcaagtcgaacggattttgatttttgtagcaatacaaagattacgattagtggcgaacgggtgagtaatagttaggaacttgccgaatagtgggggacaacagttagaaatgactgctattaccgcatactcccgagaggggaaagatttattgcgattcgagaggccgaaccacgattagcttgttggcggtgtaattgccaaccaaggcagtgatcgttagccgatcttagaggatgatctgccacattgagactgagacgcggcacaaactcctaagggaggcagcagtagggaatattggacaatggacgcaggtctgatccagcaattccgcgggggtgaagaaggtgttatgcagtgtaaaactctttggcccatgaagacaatgacggtagtgtgagaataagcaccgactaactatgtgccagcagccgcggt

SEQ ID NO: 5130 - DNA, 484 bp, Unknown
  Ascusbbf_1436211, encodes 16S rRNA
agagtttgatcatggctcaggatgaacgctggcggcgtgcttaacacatgcaagtcgaacggagaaccgcccttcgggtcggttcttattggcgtacgggtgagtaacacttgggaacataccttatagtgggggataactattggatacgcttgataataccgcattagtcctaagggagaatggtgtaattcgccataagattgtcccgcggtagtttaggcagttggtggggtcaacgccttcataacctacgatcgttacctggtctgagaggactatcagccacattgggaccgagacacggctcaaagagcaacggtgggcagcagtgaggaatattaggcaatgggggcaaccctgactcagccatgccgcgtgagtgaagaaggttttcgaattgtaaagctctttcggatgtgaagattatgacggtagcatctaaagaagccccggcaaactccgtgccagcagccgcggtaat

SEQ ID NO: 5131 - DNA, 490 bp, Unknown
  Ascusbbf_1436214, encodes 16S rRNA
agagtttgatcatggctcagaatgaacgctggcggcatggattaggcatgcaagtcgaacgggtcccttcggggactagtggcgcaagggtgagtaacacgtgatcaacctgcccccgaatccggaataatccagggaaacttggtctaaaaccggatgtcggcgtttacccgcatgggtttccgccgaaatattcatagttcggggatgggctcgcgtcccattagctggttggctgggtaactgcccaccaaggctacgacgggtaggtgtgctgtgaggatggtcacccacactgggactgggacactgcgcagacgcctacgcgagggtgaagtggagagtatacagcaaagggcgcaagcctgacggagcgatgccgcgtgaggaaagagggccttcgggttgtaaacctctgtcacccgggacgaaatcaatgacggtaccgggaaaggaagccacggctaaccacgtgccagcagccgcggta

SEQ ID NO: 5132 - DNA, 490 bp, Unknown
  Ascusbbf_1371801, encodes 16S rRNA
agagtttgatcctggctcaggatgaacgctagcggcaggcttaacacatgcaagtcgaggggtaacgcggtgtatcattactctggctactaccggcgcacgggtgcgtaactcgtatgcaacctacctttaccatggttataacggagagaaatttccactaatcccccctcttttttgttatttgcatgtttctctattgaaagcttcgtttgttactgttgggcatgcgtgcctttggatagttggtaaggtaacggcttaccaaggcgacgttgtctaggggggcgtagaggcttttccccaacactggtacggagacacggtccaaactcctacgggaggcagcagtgaggaatattgggcaatggacggaagtctgaaccagccatgcagcgtggaggaagaaggtcctatgggttgtaaactccttttgtgcgagagtaataagaggcatgcgagccgagatgagggtatcggacgaataagc

SEQ ID NO: 5133 - DNA, 490 bp, Unknown
  Ascusbbf_1341600, encodes 16S rRNA
agagtttgatcctggctcaggatgaacgctagctacaggcttaacacatgcaagtcgcggggcatcgcgaagggtatcaatactctttggcggcgaccggcggatgggtgagtaccgcgtatccaccctgtccctgtctcgggcacagcccctcgaaagagggattcattcccgatttccccgtcagttcgcatgttcttccgggcacatgtcttcatctgatcgggatggggatgcgttccattaggcggtcgccggggtaacggcccaccgagcctacgatggataggggatcggacaggaaggcacacggcaatgggactgagaaccggcccggactcgtacgggagggagcagtgaggaatattggtcgatggcggcaacgctgaaccagccaagtagcgtgagggattacggccctatgggtcttaaacctcttttgttggggagcaacctgtgcaacttgtggcacactgcgagtacccttcga

SEQ ID NO: 5134 - DNA, 490 bp, Unknown
  Ascusbbf_1436115, encodes 16S rRNA
agagtttgatcatggctcaggatgaacgctagcggcaggcttaacacatgcaagtcgaggggcagcgcggggtagcaatactctggcggcgaccggcggaagggtgcgtaacgcgtgagcaacttgcccgtcactgggggataggcactggaaacggtgtgtaatactcgataacatttggattcacatggctttatattgaaagattcgttgttgacggatggactcgcgttacattagctagtcggctgggtaccggcccacctcgcctacgatgtttaggggttctgggaggaagctacaccacatggaaactgagaaacggtcaagactagtacgggaggcagcagtgaggaatattggtcgaggggcggaagcctgaaccagccaagccgcgtgcaggaagaaggccctatgggtcgtaaactgcttttccatgagggcaataagggtcacgtgtggtccgatgagagtatcagatgaataagca

SEQ ID NO: 5135 - DNA, 490 bp, Unknown
  Ascusbbf_1341617, encodes 16S rRNA
agagtttgatcctggctcaggatgaacgctagcggcaggcttaacacatgcaagtcgaggggcagcgcggggtagcaatactctggcggcgaccggcggacgggtgcgtaacgcgtgagcaacttgcccgtcactgggggataggcactggaaacggtgtgtaatactccataacatatggattcacatggattcatattgaaatattcgtcggtgacggatgggctcgcgtaacattagctagtcggcggggtaacggcccaccggggctacgatgtttaggggttctgagaggaaggtccccgcaattgaagctcagacagggtccagactccgacgggaggcagaagtgaggaagattggtcaatgggcggaagcctgaaccagccaggcggcgtgcaggaataaggccctatgggtcgtaaactgcttttcctggagggcaataagggcacgagtggcccgatgagagtatcaggggaataagcac

SEQ ID NO: 5136 - DNA, 490 bp, Unknown
  Ascusbbf_1436144, encodes 16S rRNA
agagtttgatcatggctcaggatgaacgctagcggcaggcttaacacatgcaagtcgaggggcagcgcggggtagcaatactctggcggcgaccggcggaagggtgcgtaacgcgtgagcaacttgcccgtcactgggggataggcactggaaacggtgtgtaatactccataacatatggattcacatggattcatattgaaagattcgttggtgacggatgggctcgcgtaacattagctagtcggcggggtaacggcccaccgaggctacgatgtttaggggttctgagaggaaggtcccccacactggaaacgagaaacggtcccgaatcccacgggaggcaggcgtgaggaaacatggtcaatgggcggaagcctgaacccaccatgccgcggtcaggaataaggccctatgggtcgtaaactgcttttccttgagggcaataagggtcacgtggggtccgatgagagtatcaggggaataagca

SEQ ID NO: 5137 - DNA, 490 bp, Unknown
  Ascusbbf_1371763, encodes 16S rRNA
agagtttgatcctggctcaggatgaacgctagcgacaggcttaacacatgcaagtcgaggggcaacgcggggttagaatactctcgcgacgaccggcgcacgcttgcgtgacgcacatgtaacctacctgtaacagtggtataacgaacacgaatatacactaatcccccctattgtttgagattcgcatgtttctctaacgtaacctacgttggccagtgatgggcatgcgtgacattagctagttggtaagggaacgccttaccaagccgacgatgtctaggggggctgagaggctggtcccccacactggtactgagacacggaccagactcctacgggaggcagcagtgaggaatattggtcaatgggcggaagcctgaaccagccaagccgcgtggaggaagacggccctatgggttgtaaactgcttttgtccgggagtaataagaggcacgcgagcctcgatgagagtaccggacgaataagc

SEQ ID NO: 5138 - DNA, 485 bp, Unknown
  Ascusbbf_1341614, encodes 16S rRNA
agagtttgatcctggctcagaacgaacgctggcggcaggtcttaggcatgcaagtcgaacggacgacagagtggcttgccattctgaagttagtggcgcacgagtgagtaacgcgtgggaaactgcccttcactggggaataacgtctggacacggacgctaataccgcatacgcccgcaaggggaaagatttatcggtgatggatgtgcccgcgttggattagcttgttggtggggtaatggcctaccaaggcgatgatccatagctggtctgagaggacgatcagccacgctggaacacggacacgggcaggacgcatacgtgaggaagcagctaagaatagagggcaatgaggggagctctgaacgagccatgcagggggaatgaagaaggcctacaggttgtaaagttcatggagtcatgaagatgatgacagacgggacggaaaaagaacgggctaacatggtgcaagaggccgcgtaat

SEQ ID NO: 5139 - DNA, 490 bp, Unknown
  Ascusbbf_1436136, encodes 16S rRNA
agagtttgattatggctcaggatgaacgctagctacaggcttaacacatgcaagtcgaggggcagcatgtagctggcttgccagatatgatggcgaccggcgcacgggtgcgtaacgcgtatccaacctgccgtttacccggggacagcctcgcgaaagcgagattaatacccgatgttgtgcgtagtccgcatggggtgcgcaccaaaggattttccggtaagcgatggggacgcgtacgattagctggtcggcggggtaacggcccaccgaggcatcgatcgttaggggttctgagaggatggccccaccacctgggactgagccacggcccagacgcctacgggaggcagcagtgacgaatattcgtcaatgggcgtaagcctgaaccagccaagtagcgtgcaggacgactgccttacaggttgtaaactgcttttatgcgggggtaaagtgtcccacgtgtgggatattgcacgtaccgcatgaa

SEQ ID NO: 5140 - DNA, 490 bp, Unknown
  Ascusbbf_1341635, encodes 16S rRNA
agagtttgatcatggctcaggatgaacgctagtggcaggcttaacacatgcaagtcgaggggtaacgcgggggagcaatactctggcgacgaccggcgcacgggggcgtaacgcgtatgcaaccgacctgtaacagggggagaacggagagaaatgtccactaatcccccatatttttattctttcgcatgttaggataacgaaagcttcggtggtgacggatgggcatgcgtgacattagctagttggtaaggtaacggcttaccaaggcgacgatgtctaggggagctgagaggcttatccgcacacatgggacggggttccggcccagaatcctacgcaaggaagccgtgcggaatattcggcaatggacggaagtctgaaccagccatgcagcgtggaggaagaaggtcctatgggttgtaacctccttttgttcgagagtcataagggctttgcgaagaccgatgagcgtatcggacgaataagc

SEQ ID NO: 5141 - DNA, 490 bp, Unknown
  Ascusbbf_1341629, encodes 16S rRNA
agagtttgatcatggctcaggatgaacgctagcggcaggcttaacacatgcaagtcgaggggtaacgcggggtagccttactctgtctactaccggcccacgggtgcgtaacgcgcatgcaacctacctgtaccagggttataacggagagaaatttccactaatcccccctattttttttctttcgcatgtttggataacgaaagcttcgtttgttacggatgggcatgcgtgccattagctagttggtaagctaacggcctaccaaggcgacgatgtctaggggagctgagaggcttatcccccacactggaactgcgacacggaccaaactcctacgggaggcagcagtgaggaatattggtcaatggacggaagtctgaaccagccatgcagcgtggaggaagaaggtcctatgggttgtaaactccttttgtacgggagtaataagaggcatgcgagccgcgatgagagtatcggacgaataagc

SEQ ID NO: 5142 - DNA, 468 bp, Unknown
  Ascusbbf_1341653, encodes 16S rRNA
agagtttgatcctggctcagagcgaacgctggcggcaggcttaacacatgcaagtcgagcgccccgcaaggggagcggcagacgggtgagtaacgcgtgggaagctacccagcgctacggaataactcagggaaacgggtgcgaataccgtatacgcccttcgggggaaagatttaccggagatggatgagcccgcgtgggatgagctaggtggtgaggtaaaggctcaccaaggcgacgatccatagctggtctgagaggatgatcagccacactgggacggagacacggcccagactcctacgcgcggcagccgtggggaatcttggcccctgggcgccagcctgctcctgccctgccgcgtgagtgatgacggccctagggttgtaaagctctttcaccggtgaagataatgacggtacccggagaagaagccccggctaacttcgtgccagcagccgcggtaat

SEQ ID NO: 5143 - DNA, 375 bp, Unknown
  Ascusbbf_1341654, encodes 16S rRNA
agagtttgatcatggctcaggatgaacgctagctacaggcttaacacatgcaagtcgaggggcagcgagaggaaagcttgctgtccttgtcggcgaccggcgcacgggtgagtaacgcgtatccaaccttccccttagtagggcatagcccggcgaaagtcggattaacaccctatgttatcagaagaggacatctggcttggattaaagatttagcgctatgggatggggatgcgtctgattaggtagtaggcggggtaacggcccaccgggtcgtagaccagtaggggttctgagaggagtgggggacttgtcccttttggtaggtaccgtatgaataaggaccggctaattccgtgccagcagccgcggtat

SEQ ID NO: 5144 - DNA, 490 bp, Unknown
  Ascusbbf_1341634, encodes 16S rRNA
agagtttgatcatggctcaggatgaacgctagtggcaggcttaacacatgcaagtcgaggggtaacgcggggtagcaatactctggcgacgaccggcgcacgggggcgtaacgcgtatgcaaccgacctgtaacagggggagaacggagagaaagttccactaatcccccatattgttattctttcgcatgtgaggataacgaaagcttcggtggttacggatgtgcaggcgtgacattagctagttggtaaggtaacggcttaccaaggcgacgatgtctaggggagctgagaggcttatccccaacactgtgactgggttacggcccagactcctacgggaggcagccgtgaggaatattggtcaatggacggaagtctgaaccagccatgccgcgtggaggaagaaggtcctatgggttgtaacctccttttgttcgagagtaataagggctgtgcgaagcccgatgagcgtatcggacgaataagc

SEQ ID NO: 5145 - DNA, 468 bp, Unknown
  Ascusbbf_1341643, encodes 16S rRNA
agagtttgatcctggctcagagcgaacgctggcggcaggcttaacacatgcaagtcgagcgccccgcaaggggagcggcagacgggtgagtaacgcgtgggaatctaccaatctctacggaataacgcagggaaacgggtgctaataccgtatacgccctgcgggggaaagatttatcggagatggatgagcacgctttggatgagctagttggtgaggtaaaggctcaccaaggcgacgatccatagctgggcggagaggatgagcagcccccctgggactgagacacggcccagactcctacgggcggccgccgtggggactcttggccactcggcgcacgcctgttcccgccctgccgcgtgcgtgatgacggccctagggttgtaaagctctttcaccggtgacgataatgacggtacccggagaagacgccccggctaacttcgtgccagcagccgcggtaat

SEQ ID NO: 5146 - DNA, 490 bp, Unknown
  Ascusbbf_1371616, encodes 16S rRNA
agagtttgatcctggctcaggatgaacgctagctacaggcttaacacatgcaagtcgaggggcaacgagagcttaagtttctaatagttctgggaacccgcgcgcatgggtgtgacacgtgtaccaccttcgccgtaatgtagcgtaccgcgttgcgaatgtaagttttatgctctatgtgctgtgatgaggatatgtgcattgcagaaaagttttagcgctttgcgatggggatgtgcgtgattaggttgttggcggggtaagggcctaccaagcccgcgttcagtagggggtctgaggggaaggtcctccacattggaactgcgacacggtccaaactcctacgggaggcagcagtgaggaatattggtcaatgggcgagagcctgaaccagccaagtagcgtgcaggacgaaggccctgtgggttgtaaaccgcttttacggggggataaagtgagagacgtgtcgttcattgcaggtaccgcacga

SEQ ID NO: 5147 - DNA, 490 bp, Unknown
  Ascusbbf_1371595, encodes 16S rRNA
agagtttgatcctggctcaggatgaacgctagcggcaggcttaacacatgcaagtcgaggggtaacgcggggtagcaatactctggcgacgaccggcgcacgggtgcgtaacgcgtatgcaacctacctgtaacaggggtataacggagagaaatttccactaatcccccatattgttattctttcgcatgttaggataacgaaagcttcggtggttacggatgggcatgcgtgacattagctagttggtaaggtaacggcttaccaaggcgacgatgtctaggggagctgaaaggcgtatccccaacactggaactgggaaacggaccaaactactgcgggagggagcagtgaggaatattggtcagtggacgggagtctgaaccagccaagccgcgtgggggaagaaggtcctatgggttgtaaactgcttttgtgcgagagtaataagggctttgcgaagcccgatgagagtatcggacgaataagc

SEQ ID NO: 5148 - DNA, 490 bp, Unknown
  Ascusbbf_1371611, encodes 16S rRNA
agagtttgatcctggctcaggataaacgctggcggcgcacataagacatgcaagtcgaacggacttaactcattcttaacgattgagagcggttagtggcggactggtgagtaatgtataagtaacctgcctttcagaggggaacaacagttggaaacgactgctaataccgcatattccacgagaatcacatgattcaagtgggaaaggagcaatccgctgatagatggacttatatctgattagcgagctggtggggtaacggcctaccaaggcgacgatcagtagccggactgagcggttgagcggcaccgttggggctgagctacggcccagactccgacgggaggcagcaggcgggaatgttgagcaatggagggcacgctgacgcagtgacgccgcgggcaggaagaaggttttcggattgtaaactgctttagacagggaagaaaaaagacagtacctgtagaataagctccggctaactacg

SEQ ID NO: 5149 - DNA, 490 bp, Unknown
  Ascusbbf_1371614, encodes 16S rRNA
agagtttgatcatggctcaggatgaacgctagcgacaggcctaacacatgcaagtcgaggggcagcgcgggagaagcttgcttttcctggcggcgaccggcgcacgggtgcgtaacaggtgtgcaatctgtccatagtcggggaatagcccagcgaaagttggattaatgctccatgtgtcacgaagccgcatgactttgtgatgaaacgtaaggactatgggtgagcacgcttctgattagatagttggtgaggtaacggctcaccaagtcgacgatcagtaggggttctgagaggaaggtgccacgatgacggaatgagtaacgatgcaaagacctacgggaaggcgcagggagcaagagtggacaaggggcgagagcctgaaccagccaagtcgcgtgaaggaagaagggtctcgggagtgtaaactgcttttgtccgggagtaagaaaggccacgtgtcgcttcttgcaagtatcggacgaataag

SEQ ID NO: 5150 - DNA, 490 bp, Unknown
  Ascusbbf_1341205, encodes 16S rRNA
agagtttgatcatggctcaggatgaacgctggcggcgtgcttaacacatgcaagtcgaacggagttatctcgctgaggatagcttgctcaaatcttgagataacttagtggcggacgggtgagtaacgcgtggataacctgccttataccgggggataacacttagaaataggtgctaataccgcataagcgcacgatcccgcatgggaaagtgtgcaaaactccggtggtataagatggatccgcgtctgattagatagttggtgaggtaacgccccaccaagtcaacgatcagtagccggcatgagagggcgaactgcgacattgggactgagaaacggcacaaaatcctacgggaggaagcaggggggaatagtgcaaaatgggggaaaccctgatgcagcgacgccgcgtgagtgaagaagtatttcggtatgtaaagctctatcagcaaggaagaaaaaaatgacggtacttgactaagaagcac

SEQ ID NO: 5151 - DNA, 490 bp, Unknown
  Ascusbbf_1321741, encodes 16S rRNA
agagtttgatcctggctcaggatgaacgctggcggcgtgcttaacacatgcaagtcgaacggagttatctcgctgaggagagcttgctcaaatcttgagataacttagtggcggacgggtgagtaacgcgtggataacctgccttataccgggggataacactagaaataggtgctaataccgcataagcgcatcatcccgcatgggaaagtgtgaaacaccccggtggtcttagatggaatcgcgtcagcttaggtagttgggggggcaaaggcccaccaggtcaacgattagtagccggcctgagaggctgaacggccacattgggactgagacacggcccaaacgcctacgggaggcggcagtggggaatattgcacaatgggggaaacccggatgcagcgacgccgcgtgagtgaagaagtatttcggtatgtaaagctctatcagcaaggaagaaaaaaatgacggtacttgactaagaagcccc

SEQ ID NO: 5152 - DNA, 485 bp, Unknown
  Ascusbbf_1371566, encodes 16S rRNA
agagtttgatcatggctcagaacgaacgctggcggcaggtcttaggcatgcaagtcgaacggacgacagagtggcttgccattctgaagttagtggcgcacgagtgagtaacgcgtgggaaactgcccttcactggggaataacgtctggaaacggacgctaataccgcatacgcccgccaggggaaagatttatcggtgatggatgttcccgcgttggattaccttgttggtggggtaatggcctaccaaggcgatgatccatagctggtctgagaggacgatcagccacgctggaactgaggaacggtccagagtcagacgggaggcagcagctaagagtatggggcaatggaggaaactctcaccaagccatgccgcgtgaatgaagaaggccttcggggtgtaaagttcttttagtcaggaagatgatgacagtagtgacagaaaaagcaccggctaacgtcgtgccagcagccgcgtaat

SEQ ID NO: 5153 - DNA, 490 bp, Unknown
  Ascusbbf_1436572, encodes 16S rRNA
agagtttgatcctggctcaggatgaacgctagctacaggcttaacacatgcaagtcgaggggcagcataacgaaagcttgctgttgttgatggcgaccggcgcacgggtgagtaacgcgtatccaaccttccccttagtagggcatagcccggcgaaagtcggattaataccctatgttttccgttgatgacatctgaagtggcataaagatttatcgctaatggatgtggatgcgtctgattaggttgttggctgggtaacggcccaccaaaccatcgatcagtaggggttctgagaggaaggttccctcgaatggtactgagacacggaccaaactcctacgggaggcagcagtgaggaatattagtcgatgagcgagagcctgaaccagccaagtagcgtacaggatgacggccctatggggtgtaaactgcttttgcatgggaataaagtgagggacgtgtcccttcttgtatgtaccatgagaat

SEQ ID NO: 5154 - DNA, 490 bp, Unknown
  Ascusbbf_1341386, encodes 16S rRNA
agagtttgatcctggctcaggataaacgctggcggcgcacataagacatgcaagtcgaacggacttaactcattcttcacgcttgatagcggttagtggcggactggtgagtaatgtataagtaacctgcctatcagatgggaacaacagtttgaaccgactgctaataccgcatatgccacgagaatcacatggttcaagtgggaaaggagcaatccgctgttagatgtacttatatcttattcgctagtttgtggggtaacggcctaccaaggcgacgatcagtagccggactgagagggtaaacggccacattgggactgcgatacggcccagactccgacgggaggaagcagtcgggaagattgcgcaatggaggaaactctgacgcagtgacgccgcgtgcaggaagaaggttttcggattgtaaactgctttagaaagggaagaaaaaagacagtacctgtagaataagctccggctaactacg

SEQ ID NO: 5155 - DNA, 490 bp, Unknown
  Ascusbbf_1341371, encodes 16S rRNA
agagtttgatcatggctcaggataaacgctggcggcgcacataagacatgcaagtcgaacggacttaactcattcttaccgattgagagcggttagtagcggactggtgagtaatgtataagtaacctgcctatcagaggggaacaacagttggaaacgactgctaatcccgcatattccatgagaatcacttggttcaattgggaagggagcattccgctggtgtatgaccttttatcagattatctagttggtggggtaacggcctacaaaggatccgatcagtggccggacggaggggttaaccggccaaagtgggactgagatacggcccagactcctacgggaggaagcagtcgggaatattgcgcaatggaggaaactctgacgcagtgacgccgcgtgcaggaagaaggttttcggattgtaaactgctttagacagggaagaaaaaagacagtacctgtagaataagctccggctaactacg

SEQ ID NO: 5156 - DNA, 490 bp, Unknown
  Ascusbbf_1321721, encodes 16S rRNA
agagtttgatcctggctcaggatgaacgctagcggcaggcttaacacatgcaagtcgaggggcagcgcggggtatcactactcttgctgctaccggcggacgggtgcgtaactcgtgcgcaacttgcccgtcactgggtgataggcactggcaacggtgtgtaatactccatcacatttggattcacatggctttatatttaaagattcgttgtttacggattggctcgcgtaacattatctagtcggcggtgtaccggcccaccgaggccacgatgtttagtggttctgagaggaaggtccccaaaacgggaactgggaaacggtccagaagcctacgggaggcagcagtgaggaatagtggtcaatgggcggaagcctgaaccagccatgcagcgtgaaggaataaggccctatgggtcgtaaactgcttttccttgagggcaataaggggcacgtgtggcccgatgagagtatcaggggaataagca

SEQ ID NO: 5157 - DNA, 488 bp, Unknown
  Ascusbbf_1436547, encodes 16S rRNA
agagtttgatcatggctcagaacgaacgctggcggcaggcttaacacatgcaagtcgagcgggaattggagatagcttgctatcgaagaggagagcagcgcactggtgagtaacacgtgggaacataccttttggtgggggacaacagttggaaacgcctgctcataccgcataagccctgagggggaaagctttattgccgagtgattggtccgcggaagattaggtagttggtggggtaactgcctacctagccaacgatctatagctggtctgtgaggacgataagccaccttgggcgtgagacaccggcccgactcatacgggggggaagggggggggagattgggcaaggggggcaacgctggcccagccaagccgcgggagagaagaaggttttcggattgtaaagctctttcggacgtgaagatgatgacggtagcgtctaaagaagccccggctaacttcgtgccagcagccgcggtaat

SEQ ID NO: 5158 - DNA, 490 bp, Unknown
  Ascusbbf_1321713, encodes 16S rRNA
agagtttgatcatggctcaggacgaacgctggcggcatgcttaacacatgcaagtcgaacggactgattccttcgggatgaaagttagtggcgaacgggtgaggaatgtatgagcaacctgcctctgtcaacgggataacagttggaaacgactgctaatacggtataagaccacggcaccgcatggtgctgcggtaaaagatttttcggacagagatgggcgcatatcccattagctagttggtgagataatagcccaccaaggcgacgaggggtagccgagctgaaaggcttatcggccacagtggaactgccacacggacgcgacacctacgagaggaagcagtggggagagtggggcaatggaggaagctctgagccagaaataccgcgtgagcgatgaaggtaattttattgtaaagatcttttctcaggaacgaataaagatgacggtacctgaggaataagcaccggctaactacgtgccagc

SEQ ID NO: 5159 - DNA, 490 bp, Unknown
  Ascusbbf_1341385, encodes 16S rRNA
agagtttgatcctggctcaggataaacgctggcggcgcacataagacatgcaagtcgaacggtctcacctcattcttaacgattgagtgcggttagtgcccgactgcggagtactgtttcagtcaccttcttatcagaggggaacaacagttggaaacgactgctcatacctcttattccacgttcatctcattgttcaactgggaaaggagcaatcagctgatagctggccttacatcggattagttatttggtggggtcacggccgaccaaggcgacgatcagtagccggactgcgtggttaagaggcgacatagggactgagatacggccccgacgccgacgggaggcagcagtagggaagattgagcaatggaggaaactctgacgcagtgaggccgcgggcaggaagaaggttttcggattgtaaacagattgagaaagggaagaaaaaagacagtaccggtagaataagctccggctaactacg

SEQ ID NO: 5160 - DNA, 490 bp, Unknown
  Ascusbbf_1436477, encodes 16S rRNA
agagtttgatcatggctcaggataaacgctggcggcgcacataagacatgcaagtcgaacggacttaactcattcttaacgattgagagcggttagtggcggcctggtgagtaatgtataagtaacctgcctctcagaggggaccaacagttggaaacgactgctaataccgcatatgccacgagaatcacatggttcacgtgggaaaggggcaatccgctgatagatggacttatagctgattagctagttggtggggtaacgccctaccaacgcgacgatcagtagccggactgagaggttaaacggcgacatagagactgagagacggcacagactccgacgagaggcagcaggcgggaagattgcgcaatggaggaaactctgacgcagtgacgccgcgggcaggaagaaggttttcggattgtaaactgctttagacagggaagaaaaaagacagtacctgtagaataagctccggctaactacg

SEQ ID NO: 5161 - DNA, 490 bp, Unknown
  Ascusbbf_1371413, encodes 16S rRNA
agagtttgatcctggctcaggacgaacgctggcggcgcgcttaacacatgcaagtcgaacggtgaacagcggaaagcttgcttttagctgttcatagtggcgtacgggtgagtaacgcgtgaggacttgtcctgtacagggggacaactgatggaaacgtcagctaataccccacgagccgcgaggaaaaaggagcgatccggtacatgagagtctcgcgttctagcggttagttggtgaggtaacggcccaccaaggcgaatgcggagagccggactgagaggttggccggccacattggaactgagagacggtccagactcctgcgggaggcagcagtggggaatattgggcaatgggggaaagcctgacccagcgacgccgcgtgagtgaagaaatccctcgggatgtaaagctctgttgtgcgggaagaaggaagtgacggtaccgcacgaggaagccacggcaaactacgtgccagcagccgcgg

SEQ ID NO: 5162 - DNA, 490 bp, Unknown
  Ascusbbf_1341265, encodes 16S rRNA
agagtttgatcctggctcaggataaacgctgacggcgcacataagacatgcaagtcgaacggacttaactcattcttaacgactgagagcggttagtggcggactggtgattaatgtataagtaacctgcctatcagaggggaacaacagttggaaacgacatctaataccgcatatgccacgagaatcacatggttcacgtgggacaggagcatgtcgctgatagtcggacttatatctgattagctaattgttggggtaacgccctcccaaggcgacgatcagtatccgtactgagaggtaaaacgacaaaattgggactgggagacggcccaggggcgtacgggaggcagcggacgggaagattgcgcaatggaggaaacgctgaggaagtgacgccgcgggcaagaagaaggttatcggattgtaaactgctttagacagggaagaaaaaagacagtacctgtagaataagctccggctaactacg

SEQ ID NO: 5163 - DNA, 490 bp, Unknown
  Ascusbbf_1436504, encodes 16S rRNA
agagtttgatcatggctcaggatgaacgctagcggcaggcttaacacatgcaagtcgaggggcagcgcgggctagcaatactctggtggcgaccggcggaagggtgcgtaactcgtgcgcaacttgcccgccacttggggataggtactcggaacggtgtgtaatactccataacatatggtttcacatggcttcaaagtgaaagattcggtgttgacggatgggctcgggtaacattagctagtcgtcgtggtaacgtcacaccgagccaacgatgtgtaggggtgctgagaggaaggtcacccacactggaactgagacacggtccagactcctacgggaggcagcagtgaggaatattggtcaatggacggaagcctgaaccagccatgtagcgtgcaggaagacggccctatgggtcgtaaactgcttttccttgggggtaataagggtcacgtgtggccggatgagggtaccagaggaataagca

SEQ ID NO: 5164 - DNA, 490 bp, Unknown
  Ascusbbf_1341254, encodes 16S rRNA
agagtttgatcctggctcaggatgaacgctagctacaggcttaacacatgcaagtcgaggggcagcatgaatcaagcttgctttgtttgacggcgaccggcgcacgggtgagtaacgcgtgtccgaccttccctttagtcgagaatagcccggcgaaaatcggattaatgctcgatgttattccaagctcgcatcttagtcggatcaaaggtttatcgctataggatggggacgcgtctgattaggttgtcggcggggtaacggcccaccaaggccacgatcagtaggggttctgagaggacggtcccccacattggaactgagacacggtccagactcctacgggaggcagcagtgaggaatattggtcaatggccgagagtctgaaccagccaagtagcgtgaaggatgactgccctatgggttgtaaactgcttttgtacagggataaagtcgtcgacgtgtggcccgctgcatgtaccgtacgaat

SEQ ID NO: 5165 - DNA, 490 bp, Unknown
  Ascusbbf_1321686, encodes 16S rRNA
agagtttgatcctggctcaggatgaacgctagctacaggcttaacacatgcaagtcgaggggcatcatgtatctggcttgccatgtttgatggcgaccggcgcacgggtgcgtaatgcgtgttcgaccttccctttactcgagaatagcccatcgaaagatggattaatgccctatgttctccctttatcgcatgttattcggagcaaagatttatcgctagaggatggggacgcgtctgattagcttggcggcggggtaacggcccaccgtgcccacgatcagtaggggttctgagaggaaggtcccccacattggaactgagacacggtccagactcatacgggaggcagcagtgaggaatattggtcaatggacgagagtctgaaccagccaagtagcgtgaaggatgacggccctatgggttgtaaactgcttttgtacggggataaagtggggcacgtgtggtcggctgcaggtactgtacgaat

SEQ ID NO: 5166 - DNA, 490 bp, Unknown
  Ascusbbf_1321691, encodes 16S rRNA
agagtttgatcatggctcaggatgaacgctagcgataggcctaacacatgcaagtcgaggggcagcacatgaagtagctatacggatggtggcgaccggcgcacgggtgagtaacgcgtatgcaacctgcctacaacaggggaataacccgttgaaagacggactaataccccataacacagggatcccgcctgggaatatttgttaaagatttatcggttgtagatgggcatgcgttccattagcttgttggcggggtaacggcccaccaaggcaacgatggataggggatctgagagggtgatccccaacactggtactgagacacggaccagactcctacgggaggcagcagtgaggaatattggtcaatggacgcaagtctgaaccagccacgtcgcgtgaaggaagacggccctacgggttgtaaactgcttttgtgaggggataaagtgtagtacgtgtactattttgcatgtaccttacgaat

SEQ ID NO: 5167 - DNA, 490 bp, Unknown
  Ascusbbf_1436192, encodes 16S rRNA
agagtttgatcatggctcaggatgaacgctagcgataggcctaacacatgcaagtcgaggggcagcacatgaagtagcaatacggatggtggcggccggcccccgggggagtaacgcgtttgcaacctgcctacaacaggggaataacccgttgaaagacggactaataccccataacacagggatcccgcatgggaatatttgttaaagatttatcggttgtggatgggcatgcgttcaattagcttgttggtggggtaacggctcaccaagccaacgatggataggggaactgagaggtagatcccccacacaggtactgagaaacggaccaaactcctacgggaggcagaagtgaggaatattggtcaatggacgcaagtctgaaccagccaagccgcgtgaaggaagactgccctacgggttgtaaactgcttttgtaagggaataaagtgtagtacgtgtactgttttgcatgtaccgtacgaat

SEQ ID NO: 5168 - DNA, 486 bp, Unknown
  Ascusbbf_1321666, encodes 16S rRNA
agagtttgatcctggctcagaacgaacgctggcggcaggtcttaggcatgcaagtcgaacggacgacagagtggcttgccattcttcagttagtggcgcacgagtgagtaacgcgtgggaaactgcccttcactggggaataacgtctggacacggacgctaataccgcatacgccctcaagggtaaagatttctcggtgattgctgtgcccgctttggattgcctttttggtggggtaatggcataccacggcgctgatccatagctggtctgagaggacgaacagccacgctggaactgaggcacggtccagactcctacgggaggcagcagctaagaatattgggcaatggaggaaactctgacccagccatgccgcgtgaatgaagaaggccttcgggttgtaaagtgcggggagtcatgaagatgatgacagtagtgacagaaaaagcaccggctaacttcgtgccagcagccgcggtaat

SEQ ID NO: 5169 - DNA, 472 bp, Unknown
  Ascusbbf_1371394, encodes 16S rRNA
agagtttgatcctggctcagagcgaacgctggcggcatgcttaacacatgcaagtcgcacgaagggttcggccttagtggcggacgggtgaggaacgcggaggaatctatccatgggtgggggagaactctgggaaactggagcgaataccgcatgatacctgagggtcaaaggcgcaagtcgcctgtggaggagcctgcgttggatgagcttgttgggggggtaatggcctaccaaggcgatgatcgatagctggtcggagaggaggatcagccacactgggacggagacacggcccagactcctccgggcggcagccgtggggactcttggcccctgggggcaaccctgctccagccctgccgcgtgtgtgaagacggttttcggattgtaaagcactttcggcggggacgatgatgaccgtacccgcagacgacgccccggctaccttcgtgccagcagccgcggtaat

SEQ ID NO: 5170 - DNA, 486 bp, Unknown
  Ascusbbf_1436507, encodes 16S rRNA
agagtttgatcctggctcagaacgaacgctggcggcaggtcttaggcatgcaagtcgaacggacgacagagtggcttgccattctgaagttagtggcgcacgagtgagtaacgcgtgggaaactgcccttcactggggaataacgtctggaaacggacgctaataccgcatacgccctcaaggggaaagatttatcggtgatggatgttgccgcgttgcattagcttgttggtgggataatgggcaaacgaggtgatgagccatatctgttatgagaggacgctcagccacgctggaactgatacacggtccagactccgacgggaggcagcagctaagaatattgggaaatggaggaaactctgaccaagccatgccgcgtgaatgaagaaggccgtcgggttgtaaagttcttttagtcatgaagatgatgacagtagtgacagaaaaagcaccggctaacttcgtgccagcagccgcggtaat

SEQ ID NO: 5171 - DNA, 490 bp, Unknown
  Ascusbbf_1321647, encodes 16S rRNA
agagtttgatcatggctcaggatgaacgctagcggcaggcttaacacatgcaagtcgaggggtaacgcggggtagcaataccctggcgacgaccggcgcacgggtgcgtaacgcgtatgcaacctacctgtcacagggggataacggagagaaatttccactaataccccatattgttcttctttcgcatgctaggctaacgaaagctacggtggttacggatgggcatgcgtgatattagctagttggtaaggtaacggcctcccaaggcgacgatgtctaggggagctgagaggcagatcccccacactggaactgagaaacggtcaagactcctacgggaggaagcagtgaggaatattggtcaatggacggaagcctgaaccagccaagccgcgtggaggatgaaggtcctatgggttgtaaactgcttttgtacgggggtaatatgggcgtcgcgaagccctatgtgggtatcggacgaataagg

SEQ ID NO: 5172 - DNA, 472 bp, Unknown
  Ascusbbf_1321641, encodes 16S rRNA
agagtttgatcctggctcagagcgaacgctggcggcatgcttaacacatgcaagtcgcacgaaggggtcggcctgagtggcggacgggggagtaacgcggaggaagctatccaggggtgggggagaactctgggaaactggagcgaagaccgcatgatacctgagggtcaaaggcgcaagtcgcctgtggaggagcctgcgtccgattagcttgttggtggggtaatggcctaccaaggcgatgatcgatagctggtctgagaggaggatcagccacactgggacggagacacggcccagactcctccgggcggcagccgtggggactcttggcccctggcggccaccctgctcccgccctgccgcgtgtgtgacgacggttttcggattgtacagcactttcggcggggacgatgatgaccgtacccgcagaagacgccccggctaacttcgtgccagcagccgcggtaat

SEQ ID NO: 5173 - DNA, 490 bp, Unknown
  Ascusbbf_1316140, encodes 16S rRNA
agagtttgatcctggctcaggatgaacgctggcggcgtgcctaacacatgcaagtcgaacggggatattccgccgtttgaagcttcggcagaaaacatgggatatcttagtggcgaacgggtgagtaacgcgtgggcaacctgccccgtaccgggggatagcagttggaaacgactgataataccgcataagcgcacagcacggcatcgtgcagtgtgaaaaactccggtggtacgggatgggcccgcgtctgattagctagttggcggggtaacggcccaccaaagcgacgatcagtagccggcctgagagggcggacggccacattgggactgagacacggcccagactcctacgggaggcagcagtggggaatattgcacaatgggggaaaccctgatgcagcgacgccgcgtgagggatgaaggccttcgggttgtaaactcctttcgctagggacgaagatgtattttgacggtacctggagaag

SEQ ID NO: 5174 - DNA, 486 bp, Unknown
  Ascusbbf_1321847, encodes 16S rRNA
agagtttgatcctggctcagaacgaacgctggcggcaggtcttaggcatgcaagtcgaacggacgacagagtggcttgcccttcttaagttagtggcgcacgagtgcgtaacgcgtgggaaactgcccttcactggggaataacgtctggaaacggacgttaataccgcctccgcccgcaaggggccagatttatcggtggtggatgtgcccgcgttggattagcttgttggtggggtaatggactcccacggcgatgatccatagctggtctgagaggacgatcagcaacgctggaacttagacacggtccagactcctacgtgaggcagcagctaagaagattgggcaatggaggaaactctgacccagacatgccgcgtgaaggaagaaggccttcgggttgtaaagttcttttagtcatgaagatgatgacagtagtgacagaaaaagcaccggctaacttcgtgccagcagccgcggtaat

SEQ ID NO: 5175 - DNA, 490 bp, Unknown
  Ascusbbf_1371895, encodes 16S rRNA
agagtttgatcatggctcaggacgaacgctggcggcgtgcttcatacatgcaagtcgaacggggtccattcagtggcaacactgaggaagatctagtggcgaacgggtgagtaacacgtgaggaacctatcccggtctctggaataacaagtggaaacatttgctaataccgtatgccgtcgtctgcttgaatgaagaagtgacgaaagattcacccgattgggcgggcctcgcgacctatcagtttgttggtggggtagtggcataccaagtcatagacgagtagctggtctgacagagtgacagacccaactcggcctgagacacggcccagactcctacgggaggcagcagtagggaatctagcgaaatcggcgcaagaccgacgcagcaacgccgcgtgcgggaagaaggctcacgggttgtaaaccgctatcagtaggaacgaatttgacggtacctgcagaagaaggtgcgtccaacaacgtgc

SEQ ID NO: 5176 - DNA, 490 bp, Unknown
  Ascusbbf_1321842, encodes 16S rRNA
agagtttgatcatggctcaggatgaaagagggcggagtgcagaaaaaaggaaaggagagcgagaatttgtggaagtttaccttcggggaaacggaagcgaaggacagaggaggacggttgaggtacgcgtatggaagctgcccttcacacggtgagagagagagtaaagggggagtaagagacgagagtacggaccagcacatggtgatccggggaaagctttatcggtgaaggaggaacctgcgtctgattagctagttggtgaggtaatgccgcaacaaggcaatgatcagtagccgagctaagagggggaccctcccaactgggactgagcaacggcaccccctcctacgggcggcagcagtgggggatattgcgcaatgggcgaaagcctgacgcagcaacgccgcgtgaacgagtacgctcttcgtagtgtaaagttctgtcctatgcgaagaagatgacggtaccataggaggaagccccggct

SEQ ID NO: 5177 - DNA, 490 bp, Unknown
  Ascusbbf_1436050, encodes 16S rRNA
agagtttgatcctggctcaggatgaacgctagcggcaggcttaacacatgcaagtcgaggggcagcgcggggtagcactcctctgtcggcgcccgtcggaggggtgcgtaacgcgtgagcaacttgcccttcactgggggataggcactggaaacggtgtgtaatactccataacatatggattcacatggattcatattgaaagattcgttggtgacggatgcgctcgcgtaacattagctagtcggcggggtaacggcccaccgaggctacgatgtttaggggttctgagaggcaggtcccacacaatggaactgagaaacggtccagactcctacggaaggcagcagtgaggaatattggtcaatgggcggaagcctgagccagccaggccgcgtgaaggaataaggcccgatgggtcgtaaactgcttttccaggagggcaataagggtaacgtgtggcccgatgagagtagcaggggaataagca

SEQ ID NO: 5178 - DNA, 490 bp, Unknown
  Ascusbbf_1343677, encodes 16S rRNA
agagtttgatcctggctcaggatgaacgctagcggcaggcttaacacatgcaagtcgaggggtaacgcggggtagccatactctggcgacgaccggcgcacgggtgcgtaacgcgtatgcaacctacctgtcacaggggtataacggagagaaatttccactaatcccccatattgttagagattcgcatgtttctctaacgaaagcttcggtggttacggatcggcatgcgtgacattagctagttggtaagctaacggcataccaacgcaacgatgactaggggagctggagggcttatcccccaaaatgggacggagacacggaccagactcgtacgggaggaagcagtgaggaatattgatcaatggacggaagtcggaaccagccatgccgcgtgaaggatgaaggtgctatggattgtaaacttcttttgtcggagggtaaaaaaggccacgtgtggcttcttgaaagtatcggacgaataagc

SEQ ID NO: 5179 - DNA, 490 bp, Unknown
  Ascusbbf_1371912, encodes 16S rRNA
agagtttgatcatggctcaggatgaacgctggcggcgcgcctaacacatgcaagtcgaacggttaaggcgccttcgtgcgcctataccgtggcgaacggctgagtaacacgtgggcaacctgcccctcgcacctttacagcctcgggaaaccgtggatgatcccggatcctccgcctcccccgcatggggaggccgggacagcccgcacggcgagggatggacccgccccctgttatctagttgcctgggcagcggcccaccaacgcgatgatgggtagctgggttgagagaccgaccggcccgagtgggagcgagaaacggcccagactcctacgggaggaagcagtggggaatcttgcacaatgggcggaagccggatgcagcgacgccgcgtgcgggacgaaggccttcgggctggaaaccgctttcagcagggacgaggcgaaagtgacggtacctgcagaagaagccccggctaactacgtgcca

SEQ ID NO: 5180 - DNA, 485 bp, Unknown
  Ascusbbf_1372081, encodes 16S rRNA
agagttgatcatggctcagaacgaacgctggcggcaggtcttaggcatgcaagtcgaacggacgacagagaggcttgccattctgaagttagtggcgcacgagtgagtaacgcgtgggaaactgcccttcactggggaataacgtctggaaacggacgctaataccgcatacgcccgcaaggggaaagatttatcggtgatggatgtgcccgcgttggattagcttgttggtggggtaatggcctaccaaggcgatgatccatagctggtctgagaggacgatcagccacgctggaactgaggaaaggttccgacttcttacggggggaggaggtaaggataatgggccatggagggaactccgaaccaggcatggcgcgggaaagaagaagggccttggggtggtaaggttttttagtcatgaagatgatgacagtagtgacagaaaaagcaccggctaacttcgtgccagcagccgcggtaat

SEQ ID NO: 5181 - DNA, 490 bp, Unknown
  Ascusbbf_1343582, encodes 16S rRNA
agagtttgatcctggctcaggatgaacgctagcggcaggcttaacacatgcaagtcgaggggcagcgcggggtagcaatcctctggcggcgaccggcagaagggtgcgtaacgcgtgagcaacttgcccgtcactgggggataggcactggaaacggtgtgtaatactccattacatatggattcacatggttttatattgaaagattcgttggtgacagatgggctcgcgtaacattagcgagtcggcggggtaacggcccaccgagcctacgatgtttaggggttctgagaggaaggtcacacaacatggaactgagacacggtccagactcgtacgggaggcagcagtgaggaatattggtcaatgggcggaagcctgaaccagccatgccgcgtgcaggaagaaggcccgatgggtcgtaaactgcttttccttgagggcaataagggtcacgtgtggcccgatgagagtagcaggggaataagca

SEQ ID NO: 5182 - DNA, 486 bp, Unknown
  Ascusbbf_1372095, encodes 16S rRNA
agagtttgatcctggctcagaacgaacgccggcggcaggtcttatgcatgcaagtcgaacggacgacagagtggcttgccattctgatgttagtggcgcacgagtgagtaacgcgtgggtaactgcccttcactggggaataacgtctggatacggacgctaataccgcatacgcccgcaaggggaaagatttatcggtaatggatgtgcctgcgttggattagcttgttggtgtggtaatggcctaccatggctatgacccatagctggtctgagaggaagatcagccacgctggaattgagacacggaccagactcctacggggggcagcagctaagaatagtgggcaatggaggaaactctgacccagccatgccgcgtgaatgaagaaggccttcggggtgtaaagttcttttagtcatgaagatgatgacagtagtgacagaaaaagcaccggctaactgcgtgccagcagccgcggtaat

SEQ ID NO: 5183 - DNA, 490 bp, Unknown
  Ascusbbf_1323134, encodes 16S rRNA
agagtttgatcctggctcaggatgaacgctggcggcgtgcctaatacatgcaagtcgagcgagaaatctttcagacgattcttcgtatgagtcaggaagatggaaagcggcggacgggtgagtaacgcgtaggcaacctgccctcagcagagggatagccattggaaacgatgattaaaacctcataatgctgcagtaacacatgttacagcagccaaagattcatcggctggggatgggcctgcgtctgattaaccggttggtgaggtaacggttcaccaaggtaacgatcagtagccgaccttggaggggaaacgcgcacataggaactgagacacggtgcaaacttctacggaaggcagcagtaaggaatcttgcacaatgggggaaaccctgatgaagcaacgccgcgtgaacgatgaaggccttagggttgtaaagttctgatctgtgggaagaagaaagtgacggtaccacaggagaaagcccc

SEQ ID NO: 5184 - DNA, 165 bp, Unknown
  Ascusbbf_1385670, encodes 16S rRNA
agagtttgatcatggctcagacatatcgaaacgaatcattgaatcttcagaaccgaatagttcaaaggctaattgtttcgctaactcagttttacctacaccagttggccctacaaataggaacgaaccgattggacgatttttagggccagcagccgcggtaat

SEQ ID NO: 5185 - DNA, 490 bp, Unknown
  Ascusbbf_993699, encodes 16S rRNA
agagtttgatcatggctcaggatgaacgctggcggcgcatttaagacatgcaagtcgaacgaaaatttatgcttaaagagttgattagtttactaagatacaatttattataaattttagtggcggactggtgagtaatacataggtaatctaccttttagaggggggataactagaagaaattctagctaataccgcgtaagaccacatctaggcatctagaagaggtcaaagaagtaattcgctaaaagatgagcctgtggctgattagttagttggtggggcaatggcctaccaagacgatgatcagtagccggactgagaggttgaacggccacattgggactgagataaggcccagacccctacgggaggcagcagtgaggaatattggtcaatggtcgggagactgaaccagccaagtagcgtgcaggacgacggccctacgggttgtaaactgcttttatgcggggataaaggacgccacgtg

SEQ ID NO: 5186 - DNA, 490 bp, Unknown
  Ascusbbf_1322285, encodes 16S rRNA
agagtttgatcctggctcaggatgaacgctagcggcaggcttaacacatgcaagtcgaggggcagcgcggggtagtaatactctggcggcgaccggcggacgggtgcgtaacgcgtgagcaacttgcccgtcactgggggataggcactggaaacggtgtgtaatactccataacatatggattcacatggattcatatttaaagattcgttggtgacggatgggctcgcgtaacattagctagtcggcgtggtaacggcccaccgaggctacgatgtttaggggttctgagaggaaggtgcgccataagggaactgagaaacggtccggcatcctacgggaggcagcagtgaggaataatggtcaatgggcgaaagcctgaaccagccatgcagcgtgcaggaataaggccctatgggtcgtaaactgcttttccttgagggcaataagggtcacgtgtggcccaatgagagtatcaggggaataagca

SEQ ID NO: 5187 - DNA, 490 bp, Unknown
  Ascusbbf_1324531, encodes 16S rRNA
agagtttgatcctggctcaggatgaacgctggcggcgtgcttaacacatgcaagtcgaacggagttatctcgctgattcgatctttctcaaatcttgagataacttcgtgtcggacgtgtgcgtaacgcttgtataacctgccttctaccgggggataacacttataactagttgctactaccgcataagcgcccgatcccgcatgggaaagtgtgaaaaactccgatggtataaaatggagccgcgtctgattagttagttggtgaggtaacggcccaccaagtcaacgatcagtagccggactgagagggtgacaggcaacattgggactgggacacggcccaaacgcatacgggaggcaggagtggggaatagtgcacaatgggggaaacccggaagcagcgacgccgggggggtgaagaagtatgtcggtatggaaagcaagatcagaaaggaagaaaaaaatgacggtactggactaagaagccc

SEQ ID NO: 5188 - DNA, 490 bp, Unknown
  Ascusbbf_1342537, encodes 16S rRNA
agagtttgatcatggctcaggatgaacgctggcggcgtgcttaacacatgcaagtcgaacggagttatctcgctgaggctatcttgctcaaatcttgagataactttgtggcggacgggtgagtcacgcgtggatcacctgccttatactgggggataacacttagaaataggtgctaataccgcataagcgcacgttcccgcatgggaaagtgtgaaaaactccggtggtgtaaagtggatccgcgtctgattagatagttggtgaggtaacggcccaccaagtcaacgctcagtagccgacctgagagggggaacggccacatcgggactgagacacggcccaaacaccgacgggaggcagcagtggggaagagtgcacaatgggggaaaacctgaggcagcgacgacgcgggggtgaagaaggagttcggtaggtaaagctcgatcagcaaggaagaaaaaaatgacggtacttgactaagaagccc

SEQ ID NO: 5189 - DNA, 486 bp, Unknown
  Ascusbbf_1342552, encodes 16S rRNA
agagtttgatcatggctcagaacgaacgctggcggcaggtcttaggcatgcaagtcgaacggacgacagagtggcttgccattctgaagttagtggcgcacgcgtgagtaacgcgtgggaaactgcccttcactggggaataacgtctggaaacggacgctaataccgcatacgcccgcaaggggaaagatttatcggtgatggatgtgcccgcgttgggttggcttgtggttgggttaagggcttaccaaggtgatgatccatcgctggtctgagaggacgatgagccacgcgggaacggagacacggtccagactcctacgggaggcagcagcacagaatattgggcaagggaggaaactctgacccagccaggccgcgtgaatgaagaaggccttcgggttgtaaagttcttttagtcatgaagatgatgacagtagtgacagaaaaagcaccggctaacttcgtgccagcagccgcggtaat

SEQ ID NO: 5190 - DNA, 490 bp, Unknown
  Ascusbbf_1372426, encodes 16S rRNA
agagtttgatcctggctcaggataaacgctggcggcgcacataagacatgccagtcgaacggacttaactcattcttaacgattgagagcggttagtggcggactggtgagtaatgtataagtaacctgcctatcagaggggaacaacagttggaaacgactgctaataccgcatatgccacgagaatcacatggttcaagtgggaaaggagcaatccgctgatagatggacttatatctgattagctggttgtttgggtaacgtcctaccacggcgacgaccagtagccggactggaaggttacccggccacatgtggactgggatacggcccagactccgacgggcggcagcagtcgggaagattgcgcaatggaggaacctctgacgcagtgacgccgcgtgcaggaagaaggttttcggattgtaaactgctttagacagggaagaaaaaagacagtacctgtagaataagctccggctaactacg

SEQ ID NO: 5191 - DNA, 490 bp, Unknown
  Ascusbbf_1372427, encodes 16S rRNA
agagtttgatcctggctcaggatgaacgctagcggcaggcttaacacatgcaagtcgaggggtaacgcggggtagcaatactctggcgacgaccggcgcacgggtgcgtaacgcgtatgcaacctacctgtaacaggggtataacggagagaaatttccactaatcccccatattgttattctttcgcatgttaggataacgaaagcttcggtggttacggttgggcatgcgtgactttagctagttggtaaggtaacggcttaccaaggcgacgatgtctaggggagctgagaggcttatcccccacacaggtacagggaacaggaccaaactcctaagggaggcaggagggagcaatattggtcaatggacggaagtctgaaccagccatgccgagtggaggaagaaggacctatgggttgtaaactcctttcgttcgggggtaataagggctttgcgaagcccgatgagagtagcggacgaataagc

SEQ ID NO: 5192 - DNA, 490 bp, Unknown
  Ascusbbf_1435519, encodes 16S rRNA
agagggggagaagggcggaggaggaaagagagagagaggaggaaaaaaggaaaggagaggggaaggaggaattaggagtaaacagatagaaagaaaaaagagaaaaagaaagaaaaaaataaccacccttccctatagtaaaggatagcccggcgaaagtcggattaatactctatgttattcaatgcggacatctaagttgaatcaaagatttatcgctataggatggggatgcgtctgattaggttgttggcggggtaacggcccaccaagcctacgatcagtaggggttctgagaggaaggtctcccacattggaactgagacacggtccaaactcctacgggaggcagcagtgaggaatattggtcaatgggcgagagcctgaaccagccaagtagcgtgcaggatgacggccctatgggttgtaaactgcttttatacggggataaagtgagggacgtgtcccttattgtaggtaccgtatgaat

SEQ ID NO: 5193 - DNA, 490 bp, Unknown
  Ascusbbf_1435542, encodes 16S rRNA
agagtttgatcctggctcaggatgaacgctagctacaggcttaacacatgcaagtcgaggggcagcataacgaaagcttgcttttgttgatggcgaccggcgcacgggtgagtaacgcgtatccaaccttccccttagtagggcatagcccggcgaaagtcggattaataccctattttttccgtttaggacatctgaagtggaataaagatttatcgctaagggatgggaatgcgtcgaattaggttgttggcggtgtaacggcccaccacgccatcgctcagtaggggttctgagaggaaggtccgcaaccgtggaactggaaaaaggaacaaaatacgacgggaggcagcagtgaggaagattggtcaatgggcgagagcctgaaccagccaagtagcgtgcaggatgacggccctatgggttgtaaactgcttttgcatgggaataaagtgagggacgtgtccctttttgtatgtaccatgagaat

SEQ ID NO: 5194 - DNA, 490 bp, Unknown
  Ascusbbf_1342219, encodes 16S rRNA
agagtttgatcctggctcaggctgaacgctagcggcaggcttaacacatgcaagtcgaggggtaacgcggggtagcaatactctggcgacgaccggctcacgggtgcgtaacgcgtatgcaacctacctgtaacaggggtataacggagagaaatttccactaatcccccatattgttagagattcgcatgtttctctaacgaaagcttcggtggttacggatggtcatgcgtgacattagctagttggtacggtaacggcttaccaaggcgacgatgtctaggggagctgagaggcttatccccacagctggtacgacgacacgaaccagactcctacgagaggcagcagtgcggactattggtcaatggacggaagtctgaaccagctatgccgcgtggaggaagaaggtcctatgggttgtaaactccttttgttcgagagtaataagaggcttgcgagcctcgatgagagtagcggacgaataagc

SEQ ID NO: 5195 - DNA, 490 bp, Unknown
  Ascusbbf_1324613, encodes 16S rRNA
agagtttgatcctggctcaggatgaacgctggcggcgtgcctaacacatgcaagtcgaacgattaaaccgccttcgggcggatataaagtggcgaacgggtgagtaacacgtgaccaacctaccccgcacatcgggacagccctccgaaagggggattaataccgaatactccgtatttttcgcatgattaatacgggaaacctcttgcggggctggatggggtcgcggcgcattaggtaggagtcgggtcatcggcccgtctagcccaagacgggtagccgggttgagagaccgagcggccacattgggactgagagacggcccagactcctacgggaggcagcagtggggaatattgcgcaatgggggcaaccctgacgcggcaacgccgcgtgcgggaggaaggcattcgtgtcgtaaaccgctttcagcagggaagacatcgacggtacctgcggaagaagcaccggctaactacgtgccagcacc

SEQ ID NO: 5196 - DNA, 490 bp, Unknown
  Ascusbbf_1435567, encodes 16S rRNA
agagtttgatcatggctcaggatgaacgctagctacaggcttaacacatgcaagtcgcggggcatcatggcatgtagcaatacatgctgatggcgaccggcggatgggtgagtaacgcgtatccaacctggccctatctcgggtacagcccctcgaaagggggataaattcccgatgttccctgggatccgcatgttttcccggccaaaggcatttgtcggatggggagggggatgggttccattaggcatgcgcggggttaccgaccccccgaccctaggatgtttaggggttcggagggaaaggtcccccacacgggaattaagacacgggccagactcctacgggaggcagcagtgaggaatattggtcaatgggcggaagcctgaaccagccatgccgcgtgcaggaataaggccctatgggtcgtaaactgcttttccttgagggcaataagggtcacgagtggcccgatgagagtatcagggga

SEQ ID NO: 5197 - DNA, 490 bp, Unknown
  Ascusbbf_1435266, encodes 16S rRNA
agagtttgatcctggctcagattgaacgctggcggcaggcctaatacatgcaagtcaacgggaacagggaggaagcttggtttctcttctgacggggggggggagggggaggaagggctgggaaaatgcctggtagagggggacaacaggtggaaacggctgctaataccgcataatacctgagggttaaaaacgacaggcggtatcagatggcgccaggttggattagctatgaggtgaggtaaaggcccacctaagcgatggactctagctggtctgagagggtgatcagccacattgggactgagacacggcccagactcctacgggaggcagcagtagggaatattgcacaatggggggaaccctgatgcagccatgccgcgtgtgtgaagaaggccttcgggttgtaaagcactttcacaggggaggaaggatgacgttaccctgagaagaagcaccggctaactccgtgccagcagccgcggta

SEQ ID NO: 5198 - DNA, 490 bp, Unknown
  Ascusbbf_1372709, encodes 16S rRNA
agagtttgatcatggctcaggacgaacgctggcggcgtgcctaacacatgcaagtcgaacggaacttatgtagaagattctttcgggatgattgtgatgaagtgtagtggcggacgggggaggaacgcgggaggaaccggcctgtgagaggggaataacaatatgaaaagattgctaataccgcataacatatatttgtcgcatggcagatatatcaaagagtttatcgctcaaagatggactcgcggccgattagttagctggtgaggaaacggctcaccaagaccgcgatcggtagccggctgagagggtggaacggccaaattgggactgggacacggaccagactcctacgggaggcagcagtgggggagattgcgcaatgcgggcaaccctgacgcagcaacgccgcgtgaaggatgaaggttttcggattgtaaacttcttttattaaggacgaaaaatgacggtacttaatgaataagctccg

SEQ ID NO: 5199 - DNA, 490 bp, Unknown
  Ascusbbf_1435164, encodes 16S rRNA
agagtttgatcctggctcaggataaacgctggcggcgcacataagacatgcaagtcgaacgaacttaatcgaaagtttacttttgaagcggttagtggcggactggtgagtaacgcgtaagcaatctgcctatcagaggggaataacagtgagaaatcattgctaataccgcataagctgtgagtatcgcatgctacaaatagaaaaggagcaatccgctgatagatgagttcgcgtaagatgagatggtgagtggggtaacggcataccaagacgatgatcagtagccggactgagaggttacacggccgcatcaggactggggtgcgacccagactcctacgagcggcagcagtcgggaatgtttcacaatggaggaaactctgacgcagggacgccgcgtgcaggaagaaggttgtcggattgtaaactgctttagataggaaagaaaaaaaataacggtacctatagaataagctccggctaacta

SEQ ID NO: 5200 - DNA, 486 bp, Unknown
  Ascusbbf_1325216, encodes 16S rRNA
agagtttgatcctgtctcagaacgaacgctgtcggcaggtcttcgtcatgcaagtcgaacggacgacagagtggcttgccattctgaagttagtggctcacgagtgagtaacgcttgggaaactgcccttcactggggactaacatctgtaaacgtacgctaatacctcatactcccccaaggggatatatttatctgtagttgattttcccgcttttgattagcttttttgtggtgtaatgacctaccaaggcgattatccctagcttgtctgagaggactatcagccacgctggaacttagacacggtccagacgcatacgggaggcagcagctaagaatagtgggcaatggaggaaactctgacccagccatgccgcgtgaatgaagaaggccttcgggttgtaaagttcttttagtcatgaagatgatgacagtagtgacagaaaaagcaccggctaacttcgtgccagcagccgcggtaat

SEQ ID NO: 5201 - DNA, 490 bp, Unknown
  Ascusbbf_1372823, encodes 16S rRNA
agagtttgatcctggctcaggataaacgctggcggcgcacataacacatgcaagtcgaacggacttaatcgaaagcattcttttgacgcggatagtggcggactggtgtgtaacgcgtaagcactctgtctatcagaggggaataacagtgagaaatcattgctaataccgcataagctgtgagtatcgcatgatacaaatagaaaatgagcaatccgctgatagatgtgcttgcgtctgattagttagtaggtggggtaacggcctaccaagacgatgatcagtagccggactgagaggttaaacggcccgattgagactgcgatgcggcccagactcctacgggaggcagcagtcgagaatattgcgaaatggaggaaccgcggacgcagtgaaggcgcgtgcaggaagaaggttttcggattgtaaactgctttagatagggaagaaaaaaatgacggtacctatcgaataagctccggctaactac

SEQ ID NO: 5202 - DNA, 273 bp, Unknown
  Ascusbbf_1325220, encodes 16S rRNA
agagtttgatcatggctcaggatgaacgctagcgacaggcttaacacatgcaagtcgaggggcagcatggaggtagcaatacttctgatggcgaccggcgcactggtgagtaacacgtatgcaacctgcccctggttgggggataacccgcggaaaggcgaccgaataccgggtatgcaccctggcttgatgacttgtgcgtggtagcacgtggtccagggagagggttgcggggcattagccatcggccagctccacgccagcacaaggcgt

SEQ ID NO: 5203 - DNA, 490 bp, Unknown
  Ascusbbf_1324561, encodes 16S rRNA
agagtttgatcctggctcaggatgaacgctggcggcgtgcctaatacatgcaagtcgaacgaggtttctcttcggggaaaccgagtggcgaacgggtgagtaacacataggtaatctacctttcagactgggatacccaagagaaattttggctaataccgtctacaatcatttctcctcatggagatttgatgaaaggggctccaaagcctcgctgttagatgaacatgtggcacattagctagttggtgaaataacagccaaccaaggcgaagctgtgtagccgatctgagaggataatcggccacaaggggacggagacaccgcccgatctcctacgtgaggcagcagtagggagttttcggcaattggggaaaccctgaccgtgcaacgccgcgtgatttaggaggccctctgggtcggaagaatctgttgtaaaggagaagtggtagtgggaggaaatgcccattatttgatagtactttattag

SEQ ID NO: 5204 - DNA, 490 bp, Unknown
  Ascusbbf_1342517, encodes 16S rRNA
agagtttgatcctggctcaggataaacgctggcggcgcacataagacatgcaagtcgaacggacttaactcattcttagcgatttcgagcggttagtggcggactggtgagtaatatataagtaacctgcctctcagaggggaacaacagttggaaacgactgctaataccgcatatgccacgagaatcacattgttcaattgggaaaggagcaatccgctgatagatggacttctatctgattagctagttggtggggtaacggcataccaaggcgacgatcagtagccggactgagaggttaaacggccaaattgggactgagaaccggcccagactcctgcgggaggcagcagtagggaatattgcgcaatggaggaaactctgacgcagtgaggccgcgtgcaggaagaaggttttcggattgtaaactgctttagacagggaagaaaaaagacagtatctggagaataagctccggctaactacg

SEQ ID NO: 5205 - DNA, 490 bp, Unknown
  Ascusbbf_1342505, encodes 16S rRNA
agagtttgatcctggctcaggataaacgctggcggcgcacataagacatgcaagtcgaacggacttaactcattcttaacgattgagagcggttagtggcggactggtgagtaatgtataagtaacctgcctatcagaggggaacaacagttggaaacgactgctaataccgcatatgccacgagaatcacatggttcaagtgggaaaggagcaatccgctgatagatggacttatatctgattagctagttggtggggtaacggcctaccaaggcgacgatcagtaaccggactgagaggttgaacggccacattgggaatcagaaacggcacaaacgccgacggaaggacgcagtagggaagatgacggaatggaggaaacgcggacgcagtgacgccgcatgcaggaagaaggttttcggattgtaaactgctatagacagggaagaaaaaagacagtacctgtagaataagctccggctaactacg

SEQ ID NO: 5206 - DNA, 490 bp, Unknown
  Ascusbbf_1372712, encodes 16S rRNA
agagtttgatcatggctcaggatgaacgctggcggcgtgcttaacacatgcaagtcgaacggagttatctcgctgaggagagcttgctcaaatcttgagataacttagtggggaaggggggggaactcggtgataaactggcttataaccgggggtaaacactagaaattggtgctaataacgcctaagcgcacggacccgcctgggaaagggtgaaaaaaccccgtgggttaagatgggtccgggtccgaatagaaaggtggggaaggaaacgcccaacaaagccaccgatcgtaagccggcctgagagggtgaacggccacattgggactgcgacacggcccaaactcctacgggaggcagcagtggggaatattgcacaatgggggaaaccctgatgcagcgacgccgcgtgagtgaagaagtatttcggtatgtaaagctctatcagcaaggaagaaaaaaatgacggtacttgactaagaagccc

SEQ ID NO: 5207 - DNA, 490 bp, Unknown
  Ascusbbf_1372357, encodes 16S rRNA
agagtttgatcctggctcagaacgaacgctggctgcaggcttaacacatgcaagtcgcggggcatcatggcatgtagcaatacatgctgatggcgaccggcggatgggtgagtaacgcgtatccaacctggccctatctcgggtacagcccctcgaaagagggattaatcctcgatgttctctgggatccgcatgttttccagggcaaaggcatttgtcggttagggatggggaggtgtgcttttagtcagtcggcggggtcacggcccaccgcgccggcgatggataggggttctgagtgaaaggccccccacactgggactgagacacggcccaaactccgacgggaggaagcagtgaggaatattggtcaatggcggtgacgctgaaccagccaagtagcgtgagggattacggccctatgggttgtaaacctcttttgttagggagcaaccggtggcactagtgccattctgcgagtaccttacga

SEQ ID NO: 5208 - DNA, 490 bp, Unknown
  Ascusbbf_1342343, encodes 16S rRNA
agagtttgatcatggctcaggataaacgctggcggcgcccataagacatgcaagtcgaacggacttaactcattcttaacgattgagagcggttagtggcggactggtgagtaatgtataagtaacctgcctatcagaggggaacaacagttggaaacgactgctaataccgcatatgccacgagaatcacatggttcaagtgggaaaggagcaatccgctgatagatggacttatatctgattagctagttggtggggtaacgacctaccaatgcgacgatcagtagccggactgagaggttagacggccacatatggactcaggtacggcccaactgcctgcgggaggcagcagtcaggaataatgcggaatggaggaaactctgacgcagtgacgccgcgggcaggaagaaggttttctgattgtaaactgctttagacagggaagaaaaaagacagtacctgtagaataagctccggctaactacg

SEQ ID NO: 5209 - DNA, 490 bp, Unknown
  Ascusbbf_1342177, encodes 16S rRNA
agagtttgatcctggctcaggacgaacgctggcggcgtgcttaacacatgcaagtcgaacggtgaagcccagcttgctgggtggcttagttgcgaacgggtgcgtaacacgttagtaacctgcccctctctctgggataactccgggaaaccggtgctaatacagtatatgactacttcctgcatgggatggtggtggaaagtttttcggtgggggttggactcgcgggctatcagcttgttggtggggtaatggcctaccaaggcgacgacgggtagccggcctgagggggcgaccggccaccgtgggactgagacacggcccggactactacgggaggcagcagtgtggaatatggcacaatgggcgaaagcctgatgcagcgacgcggcgtgagggatgacggccttcgggttggaaacctcattcagcagggacgaagcttttgtgacggtacctgcagaagaagcaccggctaactacgtgccag

SEQ ID NO: 5210 - DNA, 490 bp, Unknown
  Ascusbbf_1372579, encodes 16S rRNA
agagtttgatcatggctcaggatgaacgctagcggcaggcttaacacatgcaagtcgaggggtaacgcggggtagcaatactttggcgtcgaccggcgcacgggtgcgtaacgcgtatgcaacctacctgtaccaggggtataacggtgagaaatttccactaatcccccatattgttagagatccgcatgtttctctaactaaagtttcggtggtttcggatgcgcatgcgtgacattcgctagttgttacggtaatggtttaccaaggcgacgatgtctaggggagctgagaggcatatcacccacactggaactgagacacggaccaaactcctacgggaggcagcagtgaggaatattggtcaatggacgagagtctgaaccagccatgccgcgtggaggaagacggtcctatgggttgtaaactccttttgtgcgggggtaatgagaggcatgcgagccgcaatgagagtatcggacgaataagc

SEQ ID NO: 5211 - DNA, 471 bp, Unknown
  Ascusbbf_1324423, encodes 16S rRNA
agagtttgtcctggctcagagcgaacgctggcggcatgcttaacacatgcaagtcgcacgaaggtttcggccttagtggcggacgggcgagtaacgcgcaggaatctatccatgggcgggggataactctgggaaactggagctaataccgcatgatacctgagggtcaaaggcgcaagtcgccggtggaggagcctgcgttcgatcagctagttggtggggtaatggcctaccaaagcgacgatcgatagctggtctgagcggatgaccagccacactgggattgagtcacggcccagacacctacgggaagcggcggtggggaatagtggacaatgggggcgacccagatccggcaatgccgcgtgtgtgaagaaggttttcggagaggaaagcacattcggcggtgacgatgatgacggtacccgcagaagaagccccggctaacttcgtgccagcagccgcggtaat

SEQ ID NO: 5212 - DNA, 490 bp, Unknown
  Ascusbbf_1342176, encodes 16S rRNA
agagtttgatcctggctcaggatgaacgctagcggcaggcttaacacatgcaagtcgaggggtaacgctgggtagcaatactctggcgactaccggcgcacgggtgcgtaactcgtatgcaacctacctttaacatgggtataacggagagaaatttccactaatcccccatattgttagagattcgcatgtttctctaacgaaagcttcgttggttacggatgggcatgcgtgactttagctagttggtaaggtagctgcttaccaaggcgacgatgtttaggggagctgtgaggattaccccgcaagatggtactgagacacggaccatacgcctccgggaggcagcagtgaggaatattggtcaatggacggaagtctgaaccagccatgccgcgtggaggaagaaggtcctatgggttgtaaactccttttgttcgagagtaataagaggcttgcgagcctcgatgagagtatcggacgaataagc

SEQ ID NO: 5213 - DNA, 490 bp, Unknown
  Ascusbbf_1372513, encodes 16S rRNA
agagtttgatcctggctcaggacgaacgctggcggcgtgcctaacacatgcaagtcgatcgagaattcttgatttgattctttcgggatgacgattaagaaggaaagcggcggacgggtgagtaacgcgtgagtaacctgccccatagaacggaatagcctagtgaaaactgtaataataccgtatgaagcagcagcaccgcatgatgcagctgttaacgatttatcgcgatgggatggactcgcttctgattatatggttggcggggtaacggccccccaagtcgacgatcagtcgccgaacggagtggttgatcggacaaattgggactgggacacggccccgactcctacgggaggcagcagtgggggatattgcacaatgggggaaacccggatgcagcaacgccgcgtgaaggaagaaggtcttcggattgtaaacttttgtctttagggaagaaacaaatgacggtacctaaggaggaagccac

SEQ ID NO: 5214 - DNA, 490 bp, Unknown
  Ascusbbf_1435411, encodes 16S rRNA
agagtttgatcctggctcaggatgaacgctagcggcaggcttaacacatgcaagtcgaggggtaacgcggggtagcaatactctggcgacgaccggcgcacgggtgcgtaacgcgtatgcaacctacctgtcacaggggtatagcggagagaaatttccactaatcccccatattgttagagattcgcatgtttctctaacgaaagcttcggttgttacggatgggcatgcgtgacattagctagttggtaaggtaaaggcttacccaggcgacgatgtcttagggggccgcggggctaaatccccaacactggaactgagacacggaccagacgcctacgggaggcagcagtgaggaatattggtcaatggacggaagtctgaaccagccatgcagcgtggaggaagaaggccctatgggttgtaaactccttttgttcgagagtaataagaggcttgcgagcctcgatgagagtaccggacgaataag

SEQ ID NO: 5215 - DNA, 490 bp, Unknown
  Ascusbbf_1342375, encodes 16S rRNA
agagtttgatcctggctcaggatgaacgctagcggcaggcttaacacatgcaagtcgaggggcagcgcggggtagcaatacttctggcggcgaccagcggaagggtgcgtaacgcgtcagcaacatgcccgtcgcaggtggataatcgatggaaacgtcgtctaagaccccgtaacaacatacctcgcatgggttttgtttgaatgcttcggctaccacggattgactcgcatcctattggacagttggcgggggaacggcccaccaaaccgacgatgggtatgtgttctgagtggaaggtcccgagtgatggagctgagacacgtgccaaactcctacgggaggcagaagtgaggaatattgggcaatgggcggcagcctgaaccacccatgccgcgtgcaggaataaggccctacgggtcgtaaactgcttttgtacgggagcaataagggtcacgagtggcctgatgagagtaccgtacgaataagc

SEQ ID NO: 5216 - DNA, 490 bp, Unknown
  Ascusbbf_1372472, encodes 16S rRNA
agagtttgatcctggctcaggatgaacgctggcggcgtgcttaacacatgcaagtcgaacggagttatctcgctgaggagagcttgctcaaatcttgagctaacttagtggcggacgggtgagtaacgcgtggataacctgccttataccgggggataacacttagaaataggtgctaataccgcataagcgcacgctcccgcatgggaaagggtgaacaactccggtggtataagatggatcagcgtctgattagatagttggtgaggtaacggaccaccaagtcaacgatcagtagccggcctgagcggcggaacgaccacatggtgactgggacacggcccaaactcctacgggaggcagcagtggggaatattgcacaatgggtgaaacccggatgcagcgacgccgcgtgagtgaagaagtatgtcggtatgtaaagctctatcagcaaggaagaaaaaaatgacggtacttgactaagaagccc

SEQ ID NO: 5217 - DNA, 490 bp, Unknown
  Ascusbbf_1372577, encodes 16S rRNA
agagtttgatcctggctcaggataaacgctggcggcgcacataagacatgcaagtcgaacggaattaactcatagttaacgattgagagcggttagtggcggacgggtgagtaaggtataagaaacctgcgcatcagaggggaacaacagcgggaaacgactgctaataccgcatatgccacgagaataacatggtgcaagtgggaaaggagcaatccgctgatagatggacttatatctgattagctagtgggtggggtaacggccaaccaaggcgacgatcaggagccggacggagaggtaaaacggccaaactgggactgagatacggcccagactcctacgggaggcagcagtcgcgcatattgagcaatggcgcaaacgctaacgaagagacgccgcgttcaggcagaaggttttcggattgtaaactgctttagacaggtaagaaaaaagacagtacctgtagaataagctccggctaactacg

SEQ ID NO: 5218 - DNA, 490 bp, Unknown
  Ascusbbf_1324580, encodes 16S rRNA
agagtttgatcctggctcaggatgaacgctagcggcaggcttaacacatgcaagtcgaggggcagcgcgagagtagcaatacttttggcggcgaccggcggaagggtgagtaacgcgtgagcaacatgcccgtaacagggggataaccgttggaaacgacgactaatatcccgtaatatatcgagaggcatctcttgatattgaaagcttcggtggttacggattggctcgcgtctgattaggcagttggcggggtaacggcccaccaaaccgacgatcagtaggggttctgagaggaagggccaccaaatggggactgagacaaggtcacgaatcctacaggagggagcaggggggaatatttgacaaagggcggaaggctgatacagccatggcgggggaaggacgaagggcctatggggcggaaacatcttttgttgtggagcaataaggggtgcgagcagccccgatgagagtacacagcgaataa

SEQ ID NO: 5219 - DNA, 490 bp, Unknown
  Ascusbbf_1372551, encodes 16S rRNA
agagtttgacctggctcaggatgaacgctagctacaggattaacacaggcaagtcgaggggcagcagaacgaaagcttgcttttgttgatggcgaccggcgcacgggggaggaacgcgtagccaaccttccccttaggagggcagagcccggcgaaagtcggagtaataccctatgttttccgttgaggacatctgaagtggaacaaagagttatcgcgaagggagggggaggcgtctgattaggttgttggcgggggaacggcccaccaagccatcgatcagtaggggttctgagaggaaggtccccaaccttggtactgagccccggcccaaactcctacgcgaggcagccgtgcggcatattggtcaatgggcgcgagcctgacccagccacgtagcgtgcaggatgacggccctatgggttgtaacctgcttttgcatgggaataaagtgagggacgtgtccctttttgtatgtaccatgagaata

SEQ ID NO: 5220 - DNA, 470 bp, Unknown
  Ascusbbf_1324579, encodes 16S rRNA
agagtttgatcatggctcagaacgaacgctggcggaaggcttaacacatgcaagtcgaacgatcccttcggggatagtggcagacgggtgagtaacacgtgggaatctacctggttcttcgggataacagttggaaacgactgctaataccggatacgcccttttgggggcagctttatcggaatcgtatgagcccgcgtaagattagctagatggtggggtaatggcccaccatggcgacgatctttagctggtctgagaggctgctcagccacactgggactgagacacggcacagactccaacgtggggcagcaggggggagtattggacaatgggggcaaccctgagccagccatgccgcgtgagtgatgaaggccttagggttgtgaagctctttcagtagggaagataatgacggtacctacagaagaagccccggctaacttcgtgccagcagccgcggtaat

SEQ ID NO: 5221 - DNA, 490 bp, Unknown
  Ascusbbf_1372396, encodes 16S rRNA
agagtttgatcctggctcaggacgaacgctggcggcatgcttaacacatgcaagtcgaacggactgattccttcgggatgaaatttattggcgaacgggtgagtaatgtatgagcaacctgcctctatcaacgggataacagttggaaacgactgctaatactgtatatgaccacggcaccgcattatgctgcggtaaaatatttttctgatagatatgggctcatatcccatttgctatttgttgagataacagcccaccaaggcgacgcttggtagcctagctgggaggctgatcggccacattgggactgaaaaacggaccagacacctacgggaggcagcagtggggaatattgggcaatggaggcaactctgacccagcaatgccgcgtgagtgatgaaggtaattttattgtaaagctcttttctcaggaacgaataaagatgacggtacctgaggaataagccccggctaactacgtgccagc

SEQ ID NO: 5222 - DNA, 490 bp, Unknown
  Ascusbbf_1324586, encodes 16S rRNA
agagtttgatcatggctcaggatgaacgctagcggcaggcttaacacatgcaagtcgaggggtaacgcggggtagcaatactctggcgacgaccggcgcacgggtgcgtaacgcgtatgcaacctacctgtaacaggggtataacggagagaaatttccactaatcccccatatttttattctttcgcatgttaggataacgaaagcttcgttggttacggatggacgtgcgtgacattgggtaggtggtagggtaacggatagccaaggcgacgatgactaggtgggcggagaggcttatcacccacactggtactgagacacggaccagactcctacgggaggcagcagtgaggaatattggtcaatggacggaagtctgaaccagccaggtcgcgtggaggaagaaggtcctatgggttgtaaactccttttgttcgagagtaataagaggcttgcgagcctcgatgagagtatcggacgaataagc

SEQ ID NO: 5223 - DNA, 490 bp, Unknown
  Ascusbbf_1342239, encodes 16S rRNA
agagtttgatcctggctcaggacgaacgctggcggcatgcttaacacatgcaagtcgaacggactgattccttcgggttgaaagttagtggcgaacgggtgagtaatgtatgagcaacctgcctctatcaacgggataacagttggaaacgactgctcatacggtataagaccacggcaccgcatgatgctgcggtaaaagatttttcggatagagatgggctcatatcccattagctagttggtgagataaaagcccaccaaggcgacgatcggtagccgagctgagaggctgatcggcgccattggggctgagagacggcccagacacctacgggagacggcggaggggagtattgggcaatggaggcgacactgagccagcaatgccgcgtgagtgatgaaggtaattttatggtaaagcgcttttctcaggaacgaataaagatgacggtacctgaggaataagccccggctaactacgtgccagc

SEQ ID NO: 5224 - DNA, 490 bp, Unknown
  Ascusbbf_1372575, encodes 16S rRNA
agagtttgatcctggctcaggatgaacgctagctacaggcttagcacatgcaagtcgaggggcagcgagaaggaagctttctttctttgtcggcgaccggcgcacgggtgagtaacgcgtatccaaccttccctatagtagaggatagcccgtcgaaagtcggattaatactctatgttcttcgtagaggacatctgtaatgaagcaaagattaatcgctataggatggggatgcgtctgtttatgttgttggcggtgtaacggcccaccacaccatcgatcagtaggggtactgagagggaggtccccaccattggaactgagaaacggaccaaaagcctacggagggaagacgggaggaatattggtaaatgggcgagagcctgaaccagccaagtagcgggcaggatgacggccctaggggttgtaaactgcttttgcatgggaataaagtgagggacgtgtccctttttgtatgaaccatgagaat

SEQ ID NO: 5225 - DNA, 490 bp, Unknown
  Ascusbbf_1372531, encodes 16S rRNA
agagtttgatcctggctcaggatgaacgctagcggcaggcttaacacatgcaagtcgaggggcagcgcggggtttccttactctctctgctaccgtccgacgggtgcgtaacgcgtgcgcatcatgcccttggcttggtgataagcgatgcgaacgtcgtctcagacctcgtcacaacactcctcgcatggggtttgtttgaaagcttcggctgccccggattggctcgcgtcccattaggaagttgggtgggtaacggcccaccagaccgacgcggcgtaggggttctgagaggaaggtccccaacaatggacgtgagacacggtccaaacgcctacgggaggaagaagtgaggaatattgggcaatgggcgagagactgaaccagccaggcagcgtgcaggatgaaggccctacgggtcgtaaactgcttttgtacgggagcaataaggggcacgagtggccggatgagagtaccgtacgaataagca

SEQ ID NO: 5226 - DNA, 490 bp, Unknown
  Ascusbbf_1324427, encodes 16S rRNA
agagtttgatcctggctcaggatgaacgctggcggcgtgcttaacacatgcaagtcgaacggaaaggtttcttcggaattctttcagtggcggacgggtgagtaacgcgtgggtcagctgccccatacagggtaacaacagctggaaacggctgctaataccgcataaccgcacagtgctgcatggtaccgtgtgaaaagattttatcggtatgggatggaccctcgtctgattagctagttgggggggtaacggcgcacaacggcgacgctcagtagcagacctgagagggtgagcggccacattgggacggagacacggaccaaactcctacgggaggcagcagtggggtatatggcacaatgggcgaaagcctgatgcagcgacgccgcgtgagcgaggaagtatttcggtatgtaaagctctatcagcagggaagataatgacggtacctgactaagaagcaccggctaaatacgtgccagcagcc

SEQ ID NO: 5227 - DNA, 490 bp, Unknown
  Ascusbbf_1435438, encodes 16S rRNA
agagtttgatcatggctcaggatgaacgctagctacaggcttaacacatgcaagtcgaggggcagcataacgaaagcttgcttttgttgatggcgaccggcgcacgggtgagtaacgcgtatccaaccttccccttagtagggcatagcccggcgaaagtcggattaataccctatgttttccgttgaggacatctgaagtggaataaagatttatcgctaagggatggggatgcgtctgattaggttgttggcggggtaacggcccaccaagccatcaatcagtaggggttctgagaggaagatccaacacaatggtactgagaaacggagaaaaatactcggggaggcaacagtgcggaaaagtggtcagtgggcgggagcctgaaccagcaaagaagcgtgcaggatgacggccctatgggttgtagactgcttttgcatgggaataaagtgagggacgtgtccctttttgtatgtaccatgagaat

SEQ ID NO: 5228 - DNA, 490 bp, Unknown
  Ascusbbf_1372552, encodes 16S rRNA
agagtttgatcctggctcaggatgaacgctggcggcgtgcctaacacatgcaagtcgaacggaaaggattcgtcggaattctttcagtggcggacggaggaggaacgcgtgggtaaccggccccatacaggggaacaacagctggaaacggcggcgaataccgcataagcgcacagtactgcatggtacagtgtgaaaagattttatcggtatgggatgaacccgcgtctgattagctagttggaggggtagcggcccaccaaggcgacgatcagtagccgacctgagagggtgaccggcccaattgggactgagccacggcacacactcctacgggaggcagcagtgggggatattgcacaatgggcgaaagcctgatgcagcgacgccgcgtgagtgaggaagtttttcggtatgtaacgctctatcagcagggaagaaaatgacggttcctgactaagaagccccggctaactacgtgccagcagcc

SEQ ID NO: 5229 - DNA, 490 bp, Unknown
  Ascusbbf_1372529, encodes 16S rRNA
agagtttgatcatggctcaggatgaacgctggcggcgtgcctaatacatgcaagtcgaacgaggtttcccttcggggaaaccgagtggcgaacgggtgagtaacacataggtaatctacctttcagaatgggatacccaagagaaattttggctaataccgtatacaatcatttctccgcatggagatttgatgaaaggggctccaaagcctcgctgttagatgaacctgtggcacattagctagttggtgagataacagcccaccaaggcgaaggtgtgtagccgatctgagaggataatcggccacaatgggacggggatacggcccaaactacaacgggaggcagaagtagagaggtgtcggcaaggggggaaacgctgaccgggcaacgccgcgtgatgtagaaggccctctgggtcggaagaatctgttgtaaaggagagagggtagtgggaggaaatgcccattatttgatagtacttgattag

SEQ ID NO: 5230 - DNA, 490 bp, Unknown
  Ascusbbf_1324595, encodes 16S rRNA
agagtttgatcctggctcaggatgaacgctagcggcaggcttaacacatgcaagtcgaggggtaacgcggggtagcactactctgtcgactaccggcgcacgggtgcgtaccgcgtatgcaacctacctgtaacagggttataacggagagaaatttccactaatcccccatattgttagagattcgcatgtttctctaacgaaagcttcggtggttactgatgggcatgcgtgacattagctatttggtaaggtaacggcttaccaaggcgacgatgtctatgggagctgagaggcttatcaccacaactggtactgagacacggaccagactcctacgggaggcagcagtgaggaatattggtcaatggacggaagtctgaaccagccaggccgcgtggaggaagaaggtcctatgggtggtaaactccttttgtgcgagagtaataagaggcgtgcgagcctagatgagagtatcggacgaataagc

SEQ ID NO: 5231 - DNA, 490 bp, Unknown
  Ascusbbf_1325123, encodes 16S rRNA
agagtttgatcctggctcaggacgaacgctggcggcatgcttaacacatgcaagtcgaacggactgattccttcgggatgaaagttattgtcgaacgggtgagtaatgtatgagcaacctgcctctctccacgggataacagttggaaacgactgctaatacggtgtaagaccacggcaccgcatggtgctgcggtaaaagatttttcagacagagatgggctcatatcccattagctagttggtgagataatagcccaccaaggcgacgatgggtagccgagctgagagccggatcggcgacactggggctgaaacacggaccagagacctacgggagggagaagtggggaatattgggcaatggaggaaactctgacccagcaatgccgcgtgagcgataaagggaattttattgtaaagctcttttctcaggaacgaataaagatgacggtacctgaggaataagcaccggctaactacgtgccagc

SEQ ID NO: 5232 - DNA, 490 bp, Unknown
  Ascusbbf_1341693, encodes 16S rRNA
agagtttgatcatggctcaggatgaacgctggcggcgtgcctaacacatgcaagtcgaacggaaaggattcttcggaattctttcagtggcggacgggtgcgtaacgcgtgggtaacctgccccatacaggggaacaacagctggaaacggctgctaataccgcataatcgcacagttctgcatggtacagtgtgaaaagattttgtcggtatgggatggatccgcgtctgattagctagttggagcggtaacggcccaccaagccgacgatcagtaggcgacctgagagggtgaccggcaacattgggactgagacaccgcccaaactcctacgggaggcagcagtgggggatcttgcaccataggcgggagcctgatgcagcgacgcagcgggagtgaggaagtatttcggtatgtaaagctctatcagcagggaagaaaatgacggtacctgactaagaagccccggctaactacgtgccagcaccg

SEQ ID NO: 5233 - DNA, 486 bp, Unknown
  Ascusbbf_1341707, encodes 16S rRNA
agagtttgatcctggctcagaacgaacgctggcggcaggtcttaggcatgcaagtcgaacggacgacagagtggcttgccattctgaagttagtggcgcacgagtgagtaacgcgtgggaaactgcccttcactggggaataacgtctggatacggacgctaataccgcatacgcccgcaaggggaaagatttatcggtgttgatggtgcctgggttggatgagcttgttgttggggaaatggcctaccaaggcgatggtccatagctgggctgagaggacgatcagccacgcgggaactgagacagggtccagactccgacggggggcagcagctaagaatattgggaaatggaagaaactctgacccagccatgccgcgtgaatgaagaaggccttcgggttgtaaagttcttttagtcatgaagatgatgacagtagtgacagaaaaagcaccggctaacttcgtgccagcagccgcggtaat

SEQ ID NO: 5234 - DNA, 486 bp, Unknown
  Ascusbbf_1377813, encodes 16S rRNA
agagtttgatcctggctcaggatgaacgctagctacaggcttaacacatgcaagtcgaacggacgacagagtggcttgccattctgaagttagtggcgcacgagtgagtaacgcgtgggaaactgcccttcactggggaataacgtctggaaacggacgctaataccgcatacgcccgcaaggggaaagatttatcggtcacggatgtgcccgcgttggattagcttgttggtggggtaatggcctaccaaggcgatgatccatagctggtctgagaggacgaacagccacgctggaactgagacacggaccagactcctacgtggggcagcagctaagaatactgagcaatggaggaaactctgacccagccatgccgcgggaatgaagaaggccttcgggttgtaaaaagcttttagtcatgaagatgatgacagtagtgacagaaaaagcaccggctgacttcgtgccagcagccgcggtaat

SEQ ID NO: 5235 - DNA, 486 bp, Unknown
  Ascusbbf_1324996, encodes 16S rRNA
agagtttgatcctggctcaggatgaacgctagctacaggcttaacacatgcaagtcgaacggacgacagagtggcttgccattctgaagttagtggcgcacgagtgagtaacgcgtgggaaactgctcttcactggggcataacgtctggaaacggacgctaataccgcttacgcccgccaggggatggacttatcggtgacggatgtgcccgctttggattagcttgttggtggcgtaatggcctaccagggcgatgatccatagctggtctgagaggacgatcagccacgacggaaatgagacacggtccagactccaacgggaggcagcagctaagaatattgggcaatggaggaaactctgacccagccatgccgcgtgaatgaagaaggccttcgggttgtaaaaatcttttagtcatgaagatgatgacagtagtgacagaaaaagcaccggctgacttcgtgccagcagccgcggtaat

SEQ ID NO: 5236 - DNA, 486 bp, Unknown
  Ascusbbf_1377631, encodes 16S rRNA
agagtttgatcatggctcagaacgaacgctggcggcaggtcttaggcatgcaagtcgaacggacgacagagtggcttgccattcttcagttagtggcgcacgagtgagtaacgcgtgggaaactgcccttcactggggaataacgtctggaaacggacgctaataccgcatacgcccgcacggggaaagatttatcggtggtggatgttcccgcgttggcttcgcttgttggtggggtattggcctacccaagcgatgatccttagctggtctgggaggacgctcagcaacgctggaactgagaaacggtccagactcctacgggaggcagcagctaagaatatcgggcaatggaggaaactctgaaccagccatgccgcgtgaatgaagaaggccttcgggttgtaaagttcttttagtcatgaagatgatgacagtagtgacagaaaaagcaccggctaacttcgtgccagcagccgcggtaat

SEQ ID NO: 5237 - DNA, 486 bp, Unknown
  Ascusbbf_1341662, encodes 16S rRNA
agagtttgatcatggctcagaacgaacgctggcggcaggtcttaggcatgcaagtcgaacggacgacagagtggcttgccattcttcagttagtggcgcacgagtgagtaacgcgtgggaaactgcccttcactggggcataacgtctggaaacggacgctaatccctcatacgcccgcacgggtaaagatttatcggttatggattttcccgcgttggagtagctggttggtgggttaatggcctcccaatgcgatgatccatagctggtcttagaggccgatcagccacgcgggaactgagacacggtccagactccgacgggaggcagcagctaagaatattgggcaatggaggaaactctgacccagccatgccgcgtgaatgaagaaggccttcgggttgtaaagttctttgaggcatgaagatgatgacagtagtgacagaaaaagcaccggctaacttcgtgccagcagccgcggtaat

SEQ ID NO: 5238 - DNA, 490 bp, Unknown
  Ascusbbf_1377667, encodes 16S rRNA
agagtttgatcatggctcaggatgaacgctagcggcaggcttaacacatgcaagtcgaggggtaacgcggggtagccctcctctttctactaccggcgcacgggtgcgtaacgcgtatgcaacctacctgtcccaggggtataacggagagaaatttccactaatcccccctcttgttatagattcgcatgtttctctaacgaacgcttcgttgcttacggatgggcatgcgtgacattcgctagttggtaaggtaacggcttaccaaggcgacgatgtctaggggtggtgagaggcttatcccccacactgggactgcgacacggaccagactcctacgggaggaagcagtgaggaaaatggggcaatggacgggagactgaaccagccatgcagcgtggaggaagaaggtcctatgggttgtaaactccttttgttcgagagtaataagaggctggcgagcctcgatgagagtatcggacgaataagc

SEQ ID NO: 5239 - DNA, 490 bp, Unknown
  Ascusbbf_1325067, encodes 16S rRNA
agagtttgatcatggctcaggatgaacgctagcggcaggcttaacacatgcaagtcgaggggtaacgcggggtagcaatcctctgtcgacgaccggcgcacgggtgcgtaacgcgtatgcaacctacctgtaacaggggtataacggagagaaatttccactaatcccccatattgttattctttcgcctgttcggataccgaaagcttcgttggttacggatgggcatgcgtgccattagctagttggtaaggtaacggcttaccacggcgactctgtctatgggagctgagaggcttataccccagacgggtacagcgcaacagaccagaaccctacgcaaggaagcagggaggagtattggtcaatggacggaagtctgaaccagccatgccgcgtggaggaagaagggcctatgggtggtaaactccttttgtgcgagagtaataagaggcttgcgagcctcgatgagagtatcggacgaataagc

SEQ ID NO: 5240 - DNA, 470 bp, Unknown
  Ascusbbf_1324981, encodes 16S rRNA
agagtttgatcctggctcagaacgaacgctggcggcaggcttaacacatgcaagtcgagcgcactcttcggagtgatcggcattcgggtgagtaacacgtggggatctaccaatctctaggcaataattcactgaaacttgtgctactaccctatacgcccttttgtggaaagatttatcggagtttgacgagcccgcgtgggattagctagttggtgatttaagagctcaccaaggcgacgatccctagctggtatgaggggttgatccgctacactgggactgagacacggcccagactcttagggaagggagcagtggggaatatgggacgaggcgcgcaagacggagccagccaggccgcaagggtgatgaaggccggacggatgtaaagcactttcaccgatgaagataatgacggtagtcggagaaaaagccccagctaactatgtgccagcagccgcggtaat

SEQ ID NO: 5241 - DNA, 490 bp, Unknown
  Ascusbbf_1445465, encodes 16S rRNA
agagtttgatcctggctcaggacgaacgctggcggcgtgcctaacacatgcaagtcgaacggaacttatttagaagattttttcgggatgattttgattaagtttagtggcggacgggtgagtaacgcgtgagtaacctgcctttgagaggggaataacaatctgaaaagattgctaataccgcataacatatatttgtcgcatggcagatatatcaaagattttatcgctcaaagatggactcgcgtccgattagttagttggtgaggtaacggctcaccaagaccgcgatcggtagccgaacgggagcaggacgggagggttgaccggacacattgggactgagaaacggcccagcatcctacgggaggcagaagtgggaggtattgcgcaatgggggaaacccggacgcagcaacgccgcgtgaagaatgaaggttttcggattgtaaacttcttttattagggacgaaaaatgacggtacttaatg

SEQ ID NO: 5242 - DNA, 486 bp, Unknown
  Ascusbbf_1341792, encodes 16S rRNA
agagtttgatcatggctcagaacgaacgctggcggcaggccttaggcatgcaagtcgaacggacgacagagtggcttgccattctgaagttagtggcgcacgagtgagtaacgcgtgggcaactgcccttcactggggaataacgtctggcaacggacgctaataccgcatacgcccgcaaggggaaagatgtgtcggtgatggatgtgcccgcgttggattagcttgttggtggggtactggcctaccaaggcgatgatcaatagctggtctgagtgaacgatcagccacgctggaactgagacacggtccagactcctacggggggcaagaggtaagaatatcgggcaatggaggaaactctgacccagccatgccgcgtgaatgaagaaggccttcggggtgtaaagttcttttagtcatgaagatgatgacagtagtgacagaaaaagcaccggctaacttcgtgccagcagccgcggtaat

SEQ ID NO: 5243 - DNA, 490 bp, Unknown
  Ascusbbf_1377848, encodes 16S rRNA
agagtttgatcctggctcaggatgaacgctggcggcgtgcctaacacatgcaagtcgaacggaaacaattcttcggaattctttcagtggcggacgggtgagtaactcgtggttaacctgccccatacatgggaacaacagctggaaacggctgctaataccgcctaagcgcacagtactgcatggtacagtgtgaaaagactttatcggtatgggaggtatccgcgacggattagctagttgcagtggtaacggcccaccaaggcaacgatcagtagccgacctaggagggtgccgggcaccattgggcctgagcaacggcacaaagtccaacgtggggcagcagtcgggaatattgaacaatggactaaagcctgaggcagcggcgccgcgtgggtgaggaagtatttcggtatgtaaagctctatcagcagggcagaaaatgacggtacctgactaagaagccccggctaactacgtgccagcagcc

SEQ ID NO: 5244 - DNA, 490 bp, Unknown
  Ascusbbf_1377840, encodes 16S rRNA
agagtttgatcctggctcaggacgaacgctggcggcgtgcttcatacatgcaagtcgaacgagaaactaacttcggttagtggaaagtggctgacgggtgagtaatatgtagataatctgccctagagagggggacaaccgttggaaacgacagctaataccccatatgagcgtaactgaaatgttattcttgaaaactccggtgctctaggatgagtctgcatctgattagctagttggggtggtaattgaccaccaaggccacgatcagtagctggtttgagaggatgatcagccaccaagagactgagacacgggccaaaatcctacgggaggcagcagtagggaattttgcgcaatgggcgaaagcctgacgcagcaacgccgcgtgatcgagacgcttttcggagtgtaaagatctgtcacaggggacgaacaatgacggtaccctgagaggaagcaccggctaactccgtgccagcagccgcgg

SEQ ID NO: 5245 - DNA, 470 bp, Unknown
  Ascusbbf_1445496, encodes 16S rRNA
agagtttgatcatggctcagaacgaacgctggcggcaggcttaacacatgcaagtcgagcgccctcttcggagggagcggcagactggtgagtaacacgtgggaatctacccatctctagggaataactcagggaaacttgtgctaataccctatacgcccttcgggggaaagatttttctgaggtggataagcccgcgttggattagctagttggtggggtaatggctcaccaaggcgactatccatagctggtctgagaggatgatcagccacactgggactgagacacggcccagactccgacgggaggcagcagtggggaagattggacaatgggcgaaagccggatccagccatgccgcgtgtgtgatgaaggccttagggttgtaaagcactttcaccgatgaagataatggcggtagtcggagaagaagccccggctaacttcgtgccagcagccgcggtaat

SEQ ID NO: 5246 - DNA, 490 bp, Unknown
  Ascusbbf_1445687, encodes 16S rRNA
agagtttgatcctggctcaggatgaacgctagctacaggcttaacacatgcaagtcgaggggcagcataacgaaagctggcttttgttgatggcgaccggcgcacgggggagtaacgcgtatccaaccttccccgtagtagggcagagcccggcgaaagtcggatgaataccctatgttttccgttgaggacatcttaagtggaaccaagatttatcgctaagggatggggatgcgtctgattaggttgttggcggggtaacggcacaccaagccatcgtgaagaaggggttctgagaggaaggtccaccaacgtggtactgagacacggaacaaactcctacgggaggcagccgtgaggaatattgggcaatgggcgagagcctgaaccagccaagtagcgtgcaggatgacggccctatgggttgtaaactgcttttgcatgggaataaagtgagggacgtgtccctttttgtatgtaccatgagaat

SEQ ID NO: 5247 - DNA, 488 bp, Unknown
  Ascusbbf_1445624, encodes 16S rRNA
agagtttgatcctggctcagaacgaacgctggcggcaggcttaacacatgcaagtcgagcgggattgattagtagcttgctttttatcatgagagcagcgcactggtgagtaacacgtgggtacataccttttggtgggggacaacagttggaaacgactgctaataccgcatcagctctgaggtggaaagattaattgccgtggaattggcccgcggaagtttaggtagtaggtggggtaacggcctacctagccgacgatctatagctggtctgagaggacgatcagccacattggaagtgagacacggaccagactcctacggggggcaacagtggggaatattgagcaatggaggaaactcagacccagccatgccgcgtgggtgaagaaggttttcggaggggaaagcgctttcagacgggaagatgatgacggtaccgtaagaagaagcaccggctaacttcgtgccagcagccgcggtaat

SEQ ID NO: 5248 - DNA, 486 bp, Unknown
  Ascusbbf_1377729, encodes 16S rRNA
agagtttgatcatggctcagaacgaacgctggcggcaggtcttaggcatgcaagtcgaacggccgaccgagtggcttgccattctgcagttagtggcgcacgagtgcgtaacgcgtgggcaactgcccttcactggggcataacgtctggaaacggacgctaataccgcatccgcccgcaaggggaaagatttatcggtgatggatgtgcccgcgttggtttcgcttgttggtggggtaatggcctcccaaggcggttgtccatagctggtctgagaggacgttcagccacgctggaactgggacacggtccagactcctacgggaggcagcagctaagaatattgggcaatggaggaaactctgacccagccatgccgcgtgaatgaagaaggccttcgggttgtaaagttcttttagtcatgaagatgatgacagtagtgacagaaaaagcaccggctaacttcgtgccagcagccgcggtaat

SEQ ID NO: 5249 - DNA, 486 bp, Unknown
  Ascusbbf_1325055, encodes 16S rRNA
agagtttgatcatggctcagaacgaacgctggcggcaggtcttaggcatgcaagtcgaacggacgacagagtggctttccattctgaagttagtggcgcacgagtgcgtaacgcgtgtgcaactgcccttcactggggcataacgtctggacacggacgctaataccgcatacgcccgcaaggggaagggtttatcggtgttggatgtgcccgcgttggattagcttgttggtggggtaatggcctaccaaggcggtgatccatcgctggtctgagaggacgatcagccacgctggaactgagacacggtccagaatcctacgggaggcagcagctaagaatattgggcaatggaggaaacgcggacccagccatgccgcgtgaatgaagaaggccttcgggttgtaaagtgcttttagtcatgaagatgatgacagtagtgacagaaaaagcaccggctaacttcgtgccagcagccgcggtaat

SEQ ID NO: 5250 - DNA, 490 bp, Unknown
  Ascusbbf_1323765, encodes 16S rRNA
agagtttgatcctggctcaggatgaacgctagcggcaggcctaacacatgcaagtcgaggggtagaacacttcggtgtttgagaccggcgcacgggtgcgtaacgcgtatgcaatctaccttatacaggggaatagcccagagaaatttggattaatgccccatggtattatagagtggcatcactttataattaaagttccaacggtataagatgagcatgcgtcccattagttagttggtaaggtaacggcttaccaagacgatgatgggtaggggtcctgagagggagatcccccacactggaactgggacacggaccagactcctacgggaggcagcagtgaggaatattggtcaatggtcgcaagactgaaccagccatgccgcgtgcaggaagacggtcctatggattgtaaactgcttttatacaggaagaaaccctcccacgtgtgggagcttgacggtactgtaggaataaggatcggcta

SEQ ID NO: 5251 - DNA, 490 bp, Unknown
  Ascusbbf_1325027, encodes 16S rRNA
agagtttgatcatggctcagaacgaacgctggcggcaggcttaacacatgcaagtgggacgggaagcgagggatagctggctattgattgaggagaggaacgcacgggtgagtaacacgtgggaacataccggatagggggggagaacaagtggaaacgattgataataccgcataagtcctaagggagaaaggagcaattcgctataagattggcccgcggaagattaggcaggtggtggggtaaaggcctaccaaacctacgatctatagctggtctgagaggacgatcagccacattgggactgcgacacggccccgactcctacggggggcagcagtgcggcatattgggcactgggggcaaccctgacccagccctgccgcgtgagtgaagaaggttttcgaattgtaaagctctttcggatgtgaagatgatgacggtagcatctcaagacgccccggcaaacttcgtgccagcagccgcggta

SEQ ID NO: 5252 - DNA, 288 bp, Unknown
  Ascusbbf_1325038, encodes 16S rRNA
agagtttgatcctggctcaggatgaacgctagcggcaggcttaacgcatgcaagtcgaggggtaacgcgaggtaacaatactctggctactaccggcgcacggccgcgtaacgcgtgtggaacctccctgtcacgggggtattgcggaccgatgtttccactgatcccccatattgttgttctttcgcatgttaggataacgaaagcaagaatgggggcgggggggcaagcgtggcgttagctagttggtgagggaacggcgaaccaaggccacgaagtcgaggggag

SEQ ID NO: 5253 - DNA, 490 bp, Unknown
  Ascusbbf_1325012, encodes 16S rRNA
agagtttgatcctggctcaggatgaacgctggcggcgtgcttaacacatgcaagtcgaacggagttatctcgctgaggagagcttgctcaaatcttgagatgacttagtggcggacgggtgagtaacgcgtggataacctgccttataccgtgggataacacttagaaataggtgctaataccgcataagcgcacgatcccgcatgggaaagtgtgaaaaactccggtggtataagatggatccgcgtgtgatgagatagttggtgaggtaacggcccaccaagtcaacgctcagtagccgacctgggaggggtgacggccacattgggaattagacacggccccaactcctacgggaggtagcagtggggaatattgcacaatggggggaaccctgatgcagcgaagccgcgtgagtgaagaagtatctcggtatgtaaagctctatcagcaaggaagaaaaaaatgacggtacctgactaagaagccc

SEQ ID NO: 5254 - DNA, 486 bp, Unknown
  Ascusbbf_1445679, encodes 16S rRNA
agagtttgatcatggctcagaacgaacgctggcggcaggcctcaggcatgcaagtcgaacggtcgccagagtggctttccattctgttgttagcggcgcacgagcgagtaacgcgtgggtaactgcccttcactggggtataacgtctggaaacggacgccaacaccgcatacgcccgcaaggggacagacttaccggtgctggaggtgccggcgtgggattagcctgttggtggggtaattgccgcccaaggcgaggatccatagctggtctgggaggacgatcagccacgctgggactgagacacggtccagggtcctacggggggcagcagctgagaatattaggcactggaggaaactctgacccagccatgccgcgtgaatgaagaaggccttcgggttgtaaagttcttttagtcatgaagatgatgacagtagtgacagaacaagcaccggctaacttcgtgccagcagccgcggtaat

SEQ ID NO: 5255 - DNA, 490 bp, Unknown
  Ascusbbf_1445686, encodes 16S rRNA
agagtttgatcatggctcaggataaacgctggcggctcacataagacatgcaagtcgaacgaacttaatcgaaagtgtacttttgaagcggttagtggcggactggtgagtaactcgtaagcaatctgcctatcagaggggaataacagtgagaaatcattgctaataccgcataagctgtgagtatcgcatgatacaaatagaaaaggagcaatccgctgatagatgagcttgcttctgattagttagttggtggggtaacggcccaccaagacgatgatcagtagccggactgagagggtaaacggccacattgggacggcgatacggcccagaaccgtccgggagggagcagtcgggactattgcgcaatggaggacactctgacgcagtgacgccgcgtgcaggaagaaggttttcggattgtaaactgatttagatagggaagaaaaaaatgacggtacctatagaataagctccggctaactac

SEQ ID NO: 5256 - DNA, 488 bp, Unknown
  Ascusbbf_1341767, encodes 16S rRNA
agagtttgatcatggctcagaacgaacgctggcggcaggcttaacacatgcaagttgagcgggattgattgatagcttgctattgctcatgagagcagcgcactggtgagtaacacgtgggaacataccttttggtgggggacaacagttggaaacgactgctactaccgcctcagccctgagggggaaagattaattgccgagagattggcccacggaagattaggtagtaggtggggtaacggcctacctacccgacgatctatagctggtctgagaggacgatcagccacattggaacggggacacggtccagaagcgaacggggggcaacagagaggagtattaggcaatggagggaactcggagccagccacgccgcgtgagggaagaaggttttcggagggtaaagcgcttgcagacgggaagatgatgacggtaccgtaagaagaagcaccggctaacttcgtgccagcagccgcggtaat

SEQ ID NO: 5257 - DNA, 488 bp, Unknown
  Ascusbbf_1377735, encodes 16S rRNA
agagtttgatcatggctcagaacgaacgctggcggcaggcttaacacatgcaagttgagcgggattgtttgatagcttgctattgatcatgagagcagcgcactggtgagtaacacgtgggaacataccttttggtgggggacaacagttggaaacgactgctaataccgcataagccctgagggggaaaggttaattgccgagagattggcccacgggagattaggtagtaggtggggtaacggcctacctagccgacgatctatcgctggtctgagaggacgatcagccacattggaacggagagacggtccagagtcgtacgggaggcaacggggaggaatattgggcaatggagggaactctgagccagccatgccgcgtgagggaagaaggttttcggagtgtaaagcgcgagcagacgggaagatgatgacggtaccgtaagaagaagcaccggctaacttcgtgccagcagccgcggtaat

SEQ ID NO: 5258 - DNA, 488 bp, Unknown
  Ascusbbf_1342406, encodes 16S rRNA
agagtttgatcatggctcagaacgaacgctggcggcaggcttaacacatgcaagttgagcgggattgattagtagcttgctattgatcatgagagcagcgcactggtgagtaacacgtgggaacataccttttggtgggggacaacagttggaaacgactgctaataccgcataagccctgagggggaaagattaattgccaaaaggttggcccgcggaagattaggtagtaggtgggttaacggcctacctagccgacgatcgatagctggtctgagaggacgatcagccacattggaactgcgacagggtccagagtcgtacggggggcagcagtggggaatattgggcaacggaggcacctctgaccaagccacgccgcgtgagtgaagaaggttttcggatggtaaagctctttcagacgggaagatgatgccggtaccgtaagaagaagcaccggctaacttcgtgccagcagccgcggtaat

SEQ ID NO: 5259 - DNA, 486 bp, Unknown
  Ascusbbf_1372630, encodes 16S rRNA
agagtttgatcatggctcagaacgaacgctggcggcaggtcttaggcatgcaagtcgaacggacgacagagtggcgtgccattctgaaggtaggggcgcacgagggagtaacgcgtgggaaccggcccttcactggggaagaacgtcgggaaacggacgctaataccgcatacgcccgcaaggggcacgagttatcggtgatggatgtgcccgcgttggattagcttgttgttggggtaatggcctaccaaggcgatgatccatagctggtctgagaggacgatcagccacgctggaactgagacacggtccagactcctacggggggctgcagctaagaatattgggcaatggaggaaactctgacccagccatgccgcgtgaatgaagaaggccttcgggttgtaaagttcttttagtcatgaagatgatgacagtagtgacagaaaaagcaccgtctaacttcgtggcagcagccgcggtaat

SEQ ID NO: 5260 - DNA, 490 bp, Unknown
  Ascusbbf_1435325, encodes 16S rRNA
agagtttgatcctggctcaggatgaacgctagcggcaggcttaacacatgcaagtcgaggggtaacgcggggtagcaatactctggcgacgaccggcgcacgggtgcgtaacgcgtatgcaacctacctgtaacaggggtataacggcgagaaatttccactaataccccatattgttattctttcgcatgttaggataacgacagcttcggtggttacggatggggatgcgtgacattagctagtgggtaaggtaacggcttaccaaggcgacgatgtctaggggagctgagaggcttatcgcccacgctggtagtgagacacggatcagactactacgggaggcagcagcaaggaagagtgggcaatggggagaagtgtgaaccagacgagcctcgtgggggaagaaggtgctagtggtaggaaactccttgtgttggagagtaataagaggcgggcgagccacgaggagagtatcggacgaataggc

SEQ ID NO: 5261 - DNA, 490 bp, Unknown
  Ascusbbf_1372598, encodes 16S rRNA
agagtttgatcctggctcaggataaacgctggcggcgcacataagacatgcaagtcgaacgaacttaatcgaaagtttacttttgaagcggttagtggcggactggtgagtaacgcgtaagcaatctgcctatcagaggggaataacagtgagaaatcatttctaataccgcctaagctgtgagtatcgcatgatacaaatagaaaagtagcaatccgctgatagatgagctggcgtctgattagttagtgggtggggtaacggcctaccaagacgatgatcagtagccggactgagaggttaatcggcaacatagggactgagataaggcccaaactcctacgggaggcagcagtagggaatattgcgaaatggaggaaactcggacgacgtggagacgcgtgcaggaagaaggttttcggattgtaaactgctttagatagggaagagaaaaatgacggtacctatagaataagctccggctaactac

SEQ ID NO: 5262 - DNA, 415 bp, Unknown
  Ascusbbf_1325171, encodes 16S rRNA
agagtttgatcctggctcaggataaacgttggcggcgcacataagacatgccagtcgaacgaacttaatcgaaagtttacttttgaagcggttagtggcggactggtgagtaacgcgtaagcaatctgcctatcagaggggaataacagtgagaaatcattgctaataccgcataagctgtgagtatcgcatgatacaaatagaaaaggagcaatccgctgatagatgagtacgcgtctgattagttcgttggtgaggtgacgggaatatagcgcaatggagggtacccggacgcagtgacgccgcgtgcaggaagaaggttttcggattgtaaactgctttagatagggaagaaaaaaatgacggtacctatagaataagctccggctaactacgtgccagcagccgcggtaat

SEQ ID NO: 5263 - DNA, 488 bp, Unknown
  Ascusbbf_1372622, encodes 16S rRNA
agagtttgatcctggctcagaacgaacgctggcggcaggcttaacacatgcaagttgagcgggattaattgatagcttgctattaattatgagagcagcgcactggtgagtaacacgtgggaacataccttttggtgggggacaacagttggaaacgactgctaataccgcataagccctaagggggaaagattaattgccgaaagattggcccgcggaagattaggtagtaggtggggtaacggcctacctagccgacgatctatagctggtctgagaggacgatcagcctcattggaacctgggcaccggtcagggtcctaccggggggagtagtggagaaattttggcaatgaaggcaactctgacccagccatgccgcgtgagtgaagaaggttttcggattgtaaagctctttcagacgggaagatgatgacggtaccgtcagaagaagcaccggctaacttcgtgtcagcagccgcggtaat

SEQ ID NO: 5264 - DNA, 353 bp, Unknown
  Ascusbbf_1325310, encodes 16S rRNA
agagtttgatcctggctcaggatgaacgctggcggcgtgcctaacacatgcaagtcgaacgaagcaccttttcacgatcccttcggggtgacgagattgtgacttagtggcggacgggtgagtaacgcgtggggaacccgccctgtactgggggatagcgactggcaacggtcgttactaccgcataagcgcaggccataacatggtgaagtgtgcaatggtcgaatgctagatgatgcgaccgcgtctgagtggcgaagtatttcggtatgtaaagccctatcagcagggaagaaattgacggtacctgactaagaagctccggttaaatacgtgccagcagccgcggtaat

SEQ ID NO: 5265 - DNA, 490 bp, Unknown
  Ascusbbf_1325155, encodes 16S rRNA
agagtttgatcctggctcagaacgaacgctggcggcaggcttaacacatgcaagttggacgggaatcgattgatagcttgctattgattgaggagagtagcgcacgggtgagtaacacgtgggaacataccttatagtgggggataacaattggaaacgattgataataccccataagtcctattggagaaagaagcaattcgctctacgattggcccgcggaagattaggcggttgttggggtaaaggcctaccaaacctacggtctatagctggtatgagaggacgatcagccacatttggactacgagacggcccagacaccaacgggaggcagcagtgaggagtattaggcaatgggggcaaccctgacccagccatgccgcgtgagtgaagaaggttttcgaattgtaaagctctgtcggatgtgaagatgatgacggtagcatctaaagaagccccggcaaacgtcgtgccagcagccgcggta

SEQ ID NO: 5266 - DNA, 490 bp, Unknown
  Ascusbbf_1325311, encodes 16S rRNA
agagtttgatcctggctcaggataaacgctggcggcgcacataagacatgcaagtcgaacggacttaactcattcttaacgattgagagcggttagtggcggactggtgagtaatgtataagtaacctgcctatcagaggggaacaaccgctggaaacgactgctaataccgcatatgccacgagaatcacatggttcaagtgggaaaggagcaatccgctgatagatggacttatatgtgattagctagttggtggggtaacggcctaccaaggggacgaacagtagccggactgggaggttaaacagcgacaaagggactgcggtacggcgcagagtccaacgggaggcagcggtcgggaatattacgcaatggaggaaactctgacgcagtgacgccgcgtgcaggaagaaggttttcggattgtaaactgctttagacagggaagaaaaaagacagtacctgtagaataagctccggctaactacg

SEQ ID NO: 5267 - DNA, 490 bp, Unknown
  Ascusbbf_1342493, encodes 16S rRNA
agagtttgatcatggctcaggacgaacgctggcggcgtgcctaacacatgcaagtcgaacgaggtccatgcagtggcaacactgcggaagacctagtggcgaacgggtgagtaacccgtgaggaacctgccccgaagaccgggataaccctccgaaaggagagctaataccggatacccccatcaggtggcatgatttgatgaggaaatggattccgcttcgggagggcctcggggcatatcatctagtgggtgggggaacggcctaccaaggcattgactggtggctggtctgagaggtggatcggcaaaactgggactggaaaccgccccagattcctccggagggaagcagaggggaatctggcgcaatgggcgaaagcctgaggcagcaacgccgcgggggggatgaaggctttcgggttgtaaacccctttcagcagggacgaatcaagacggtacctgcagaagaagccccggctaactacgtg

SEQ ID NO: 5268 - DNA, 486 bp, Unknown
  Ascusbbf_1325116, encodes 16S rRNA
agagtttgatcctggctcagaacgaacgctggcggcaggtcttaggcatgcaagtcgaacggacgccagagtggcttgccattctgaagctagtggcgcacgagtgagtaacgcgtgggaaactgcccttcactggggaataacccctggaaacggacgctaataacccatacgcccgcaaggggaaagatttatcgctgatggatgtccccgcgttggattggagtgttagtcgggtaatggcctacccaggcgatgaaccatagctggcatgagaggacgatcatccacgctggaactaagacacggtccagcctcctacaggaggcagcagctaggaatatgaagcaatggaggaaactctgacacagccatgccgcgtgaatgaaaaaggccttcgggttgtaaagttcttgtggtcataaagatgatgacagtagtgacagaaaaagcaccggctaacttcgtgccagcagccgcggtaat

SEQ ID NO: 5269 - DNA, 490 bp, Unknown
  Ascusbbf_1372649, encodes 16S rRNA
agagtttgatcctggctcagaacgaacgctggcggcaggcttaacacatgcaagttggacgggaatcgattgatagcttgctattgattgaggagagtagcgcacgggtgagtaacacgtgggaacataccttatagtgggggataacaattggaaactattgcttataccgcttacgtcgtaagggtgaatggagaatttcggtctctgatttgcggggggaagattaggcagttggtggggtaaagtcctaccaaacctacggtctatagctggtctgagaggacgatcagccacattgggactgagacacggcccaaactcctacgtgaggcagcagtggggaatattgggcaatgggggcaaccctgacccagccatgccgcgtgagtgaagaaggttttcgaagtgtaaagctctttcggatgtgaagatgatgacggtagcatctagagaagccccggcaaacttcgtgccagcagccgcggta

SEQ ID NO: 5270 - DNA, 490 bp, Unknown
  Ascusbbf_1325274, encodes 16S rRNA
agagtttgatcctggctcaggatgaacgctagcggcaggcttaacgcatgcaagtcgaggggcagcgcggggtagcaatactctggcggcgaccggcggaagggtgcgtaacgcgtgagcaacttgcccgtcactggaggataggcactggaaacggtgtgtaatactccataacataagttttcgcatgaagatttattgaaagattcattggtgacggatgggctcgcgagacattagctagtcggcggggtaacggcccaccgaggctacgatgtctaggggttctgagaggaaggtccacaacacgggaactgggacacggtccagactcctacgggaggaagcagtgaggagtagtggtaaatgggcggaagcctgaaccagccatgccgagtgaaagaataaggccctatgggtcgtaaacttcttttccttgagggcaataaggatcacgcgtggtccgatgagagtatcaggggaataagca

SEQ ID NO: 5271 - DNA, 490 bp, Unknown
  Ascusbbf_1324949, encodes 16S rRNA
agagtttatcctggctcaggatgaacgctagcggcaggactaagacaggcaagtcgaacgggaaaggtcccgtcggggatatgagagtggcgcacgggggcggaacgcgtatgcaacccacccgctggcgggggatagcccggagaaaggcgaatgaataccccatgaggagacaggacggcatcgtcctgttttcaaaactacggtgacggcggacgggcatgcatgccattagatagttggcggggtaacggcccaccaagtcgacgagggccaggggatcggagaggacggtccccccaccgcgtactggaccccggcccagactcctacgggaggcagcagtaccggatattgggcaatggggggaaccctgaaccagccatgccgcgtgagggattaaggccctacgggtcgtaaacctcttttgccgggggataaagacagcctcgtgaggttgtttgaaggtacccggagaataagcatcggc

SEQ ID NO: 5272 - DNA, 490 bp, Unknown
  Ascusbbf_1341824, encodes 16S rRNA
agagtttgatcctggctcaggatgaacgctagctacaggcttaacacatgcaagtcgaggggcagcgtatcgcacgcttgcttttgatgatggcgaccggcgcacggctgggtaacgcgtttcccaccttccctatattagcgtatagcccggcgtctgtcggcttatatctctttgttcttgggagaagacatctgaaatgaagcaatggtttaccggcatagggtcggcatgcgtctgcttaggttggtggcgggaaaacggctcaccaagtacccgatcagtaggggttctgtgagacaaggccctaacagggggactgggcaacgggcgaaacacctacgggacagagcagtgaggaatattggtgaatggacgagagcctgaagcaggcaagtagcgtgcaggaagacggcccgaggggtggcaaactgctggtagtcagggacaaagtacactacggaaggtattttgtaggtaccggaagaag

SEQ ID NO: 5273 - DNA, 490 bp, Unknown
  Ascusbbf_1377776, encodes 16S rRNA
agagtttgatcatggctcaggataaacgctggcggcgcacataagacatgcaagtcgaacggacttaactcattcttaacgattgagagcggttagtggcggactggtgagtaatatataagtaacctgcctctcagaggggaacaacagttggaaacgactgctaataccgcatatgccacgagcatcacatggttcaagtgggaaaggagcaatccgctgatagataggcttatatctgattagctagttggtggggtaacggccaaacaaggcgacgatcagtagccggcctgagaggttaaacggcacagtggggactgagatacggaccataatccgacgggaggcagcaggcgggaatatggcgcaagggaggaaactcggacgcagtgacgccgcgtgcaggaagaaggttttcggagtgtaaactgctttagacagggaagaaaaaagacagaacctgtagaataggctcgggctaactacg

SEQ ID NO: 5274 - DNA, 490 bp, Unknown
  Ascusbbf_1324948, encodes 16S rRNA
agagtttgatcctggctcaggatgaacgctagcggcagtcttaaccccttcccttctcggggtcacgcggggtagcactcctctggcgacgaccggcgcacgggttcttccctcttcttccccctccctgtacccttggtataacggagagaaatttcccctactcccccatattgttcttctttctcattgtaggataacgaaagcttcggtggttacggatgggcatgcgtgaccttagctagttggtaaggtaacggcttaccaaggtgacgatgtctaggggagctgagaggcttatccaccagacgggcacggagacacggaccagcatcctccgggtggaagcggttaggaatattggtcaatggacggaagtctgaaccagccgtgccgcgtggaggaagaaggtcccatgggttgtaaactccttttgttcgagagtaataagggctttgcgaagcccgatgagagtatcggacgaataagc

SEQ ID NO: 5275 - DNA, 490 bp, Unknown
  Ascusbbf_1325266, encodes 16S rRNA
agagtttgatctggctcaggatgaacgctagctacaggcttaacacatgcaagtcgaggggcagcataacgaaagcttgcttttgttgatggcgaccggcgcacgggtgagtaacgcgtatccaaccttccccttagtagggcatagcccggcgaaagtcggattaataccctatgttttccgttgaggacatctgaagtggaacaaagatttatcgctaagggatggggatgcgtctgattaggttgttggcggggtaacggccaaccaagccatcgatcagtaggggttctgagaggaatgtcccacacgtatggagtgacagacggaccaagctcgtacgggaggagggagtgaggatgattgatcgatggacgaaggactgaaccagccaagttgcgtgcaggaggacgtccggatgggttgtaaactgctattgcaggaagataaagtgtgagacgagtccctttttgtatgtaccatgtgaata

SEQ ID NO: 5276 - DNA, 490 bp, Unknown
  Ascusbbf_1342440, encodes 16S rRNA
agagtttgatcatggctcaggacgaacgctggcggcatgcttaacacatgcaagtcgaagggacggatgaaggagggatgaaaggtaggggtgaaggggggaggaatgtatgagcaaactgcatgtgagaatgggataaaagggggaaaagagggagaagaggggataagaccacggcaccgcatggtgctgcggtaaaagatttttcgggcagagatgggctcatatcccattagctagttggtgagctaatagccaaccaagccgacgatgggtagccgagctgagaggctgatcggcacccttgggactgaaacacggcccagaacactacgggaggcagcagtggggaatattgggcaatggaggaaactctgagccagcaatgccgcgtgagcgatgaaggtaattttattgtaaagctcgtttctcaggaacgaataaagatgacggtacctgaggaataagccccggctaactacgtgccagc

SEQ ID NO: 5277 - DNA, 490 bp, Unknown
  Ascusbbf_1342464, encodes 16S rRNA
agagtttgatcatggctcaggatgaacgctagcggcaggcttaacacatgcaagtcgaggggcagcgcggcgtagccatactctggcggcgagcggcggacgcacgcgtaaggcgtgagtatcttgcccgccactgggtggtaggtaccggaacgagtgtgtaatactccatatcttatggatactgatggctttttattgaaagcttcgtttgtgacggatgggttggcgtaacatcagatagtcggcggggtagcggcccaccgagcctacgatacgtaggggatctgtgaggaaggtcccccacactggacctgggacacggtccaaactcctacgggaggcagcagtgaggaatattggtcaatgggcggaagcctgaaccagccaagccgcgtgcaggaagaaggccctatgggtcgtaaactgcttttccacgagggcaataagggtcacgtgtggccctatgtgagtatcggatgaataagca

SEQ ID NO: 5278 - DNA, 490 bp, Unknown
  Ascusbbf_1445551, encodes 16S rRNA
agagtttgatcatggctcaggatgaacgctagcggcaggcttaacacatgcaagtcgaggggtaacgcggggtagcaatactctggcgacgaccggcgcacgggtgcgtaacgcgtatgcaacctacctgtaacaggggtataacggagagaaatttccactaatcccccctattgttagagattcgcatgtttctctaacgaaagcttcggtggttacggtagggcgtgcgtgagattagctaggtggtagggtaacggcttaccaaggcgacgatgtctaggggggctgagaggctgatccccaacactggaactgagacacggaccagactcctacgggaggcagcagtgaggaatattggtcaatggacgagagtctgaaccagccatgccgcgtggaggaagaaggtcctatgggttgtaaactccttttgtgcgggagtaataagaggctcgcgagcctggatgagagtatcggatgaataagc

SEQ ID NO: 5279 - DNA, 490 bp, Unknown
  Ascusbbf_1342452, encodes 16S rRNA
agagtttgatcatggctcaggatgaacgctagctacaggcttaacacatgcaagtcgcggggcatcatggcatgtagcaatacatgctgatggcgaccggcggatgggtgagtaacgcgtatccaacctggccctatctcgggtacagcccctcgaaagagggattaattcccgatgttccctgggatccgcacgttttccagggcaaaggcatttgtcggatagggatggggatgcgttccattaggcagtcggcggggtaacggcccaccgagcctacgatggataggggttctgaggggaaaggccccgcaaactgggactgagaacaggcccggacgcgtacggggggcagcagtgaggaatagtggtcaatggcggtaacgctgaaccagccaagtagcgtgagggattacggccctatgggttttaaacctcttttgttagggagcaaccggtggcactagggcaattctgcgagtacctttcg

SEQ ID NO: 5280 - DNA, 490 bp, Unknown
  Ascusbbf_1373048, encodes 16S rRNA
agagtttgatcctggctcaggataaacgctggctgcgcacataagacatgcaagtcgaacgaacttaatcgaaagtttacttttgaattgggtagtggcggactggtgagtaacgcgtaaacaatctgcctttcagagaggaataacagtgagaaatcattgctaataccgcatcagctgtgagtatcgcatgatacaaatagaaaaggagcaatccgctgttagatgagcttgcgtctgattagttagttggtgtggtaacggactacccagacgatgatcaggagccggactgagagggtaagaggccacggtgggaactagatacggcccaagcacctacgagaggcagcagacgggaatattgcgcaatggaggaaactctgacgcagtgacgccgcgtgcaggaagaaggttgtcggattgtaaaatgctttagatagggaagaaaaaaaatgacggtacctatagaataagctccggctaacta

SEQ ID NO: 5281 - DNA, 490 bp, Unknown
  Ascusbbf_1322023, encodes 16S rRNA
agagtttgatcatggctcaggacgaacgctggcggcatgcttaacacatgcaagtcgaacggactgattccttcgggttgcaagttagtggcgaacgggtgagtaatgtatgatcaacctgcctctatcaacgggataacagttggaaacgactgctaatacggtataagaccacggccccgcctgatgctgcggtaaaagatttttcggctaggaatgggctcatttcccattagctagttggtaggataacagcccaccaaggcgacgattggtagccgagcgtagaggctgatcggccacatagggacggaaacacggcccagactcctacgggaggcagcagtggggaagaatgggcaatggaggcaactctgacccagcaatgccgcgtgagtgatgaaggtaattttattgtaaagctcgtttctcaggaacgaataaagatgacggtacctgaggaataagccccggctaactacgtgccagc

SEQ ID NO: 5282 - DNA, 490 bp, Unknown
  Ascusbbf_1340749, encodes 16S rRNA
agagtttgatcctggctcaggatgaacgctagcggcaggcttaacacatgcaagtcgaggggtaacgcggggtagcaatactctggcgactaccggcgcacgggtgcgtaacgcgtatgcaacctacctttaacaggggtataacggagagaaatttccactaatcccccatattgttattctttcgcatgttaggataacgaaagcttcggtggttacggatgggcatgcgtgacgttagctagttggtaaggtaacggcttaccaaggcgacgatgtctaggggagctgagaggcgtatcccacacacgggaacggagaaacggacaagactccaacgggaggcagcagtggggaatattggtcatggacggaagtcggaaccagccatgccgcgtggaggaagaaggtccgatgggtgggaaactccttttgttcgagagtaataagaggatggcgagcctcgatgagagtatcggacgaataagca

SEQ ID NO: 5283 - DNA, 490 bp, Unknown
  Ascusbbf_1322009, encodes 16S rRNA
agagtttgatcctggctcaggacgaacgctggcggcatgcttaacacatgcaagtcgaacggactgattccttcgggatgaaagttagtggcgaacgggtgagtaatgtatgagcaacctgcctctatcaacgggataacagttggaaacgactgctaatacggtataagaccacggcaccgcatgatgctgcggtaaaagccttttcggagagagatgggctcatatcccattagctagttggtgagataacagcccaccagggcgacgatgggtagccgagctgagaggctgatcggccacattgggcagaaaacacggcgcagactcctacgggaggcagcagtggggaagattgggcaagggcggcaactctgaccccgcaatgccgcgtgggtgatgaaggtaattttattgtaaagctcttttctcaggaacgaataaagatgacggtacctgaggaataagccccggctaactacgtgccagc

SEQ ID NO: 5284 - DNA, 470 bp, Unknown
  Ascusbbf_1322013, encodes 16S rRNA
agagtttgatcatggctcagaacgaacgctggcggcatgcctaacacatgcaagtcgaacgagaccgtcgggtcgagtggcgcacgggtgcggaacgcgggggaaccggcccttaggttcggaagaactcaccgaaaggggggcgaagaccggagaatgtcttcggaccaaagagtgatcgcctttggaggggcccgcgttggatgagcgagttggggaggtaaaggcgcaccaaggcgacgatccagagctggtcgtagaggaggatcagccacactgggactgagacacggcccagactcctccggggggcagccgtggggcctcttggccactgggcgaccgcctgctcccgccctgccgcgtgagtgatgacggccttagggttgtacagctcttttaccagggatgataatgaccgtacctggagactacgctccggctacctccgtgccagcagccgcggtaat

SEQ ID NO: 5285 - DNA, 470 bp, Unknown
  Ascusbbf_1322010, encodes 16S rRNA
agagtttgatcctggctcagaacgaacgctggcggcaggcttaacacatgcaagtcgagcgcccttttcggagggagcggcagacgggtgagtaacgcgggggaatctacccatctctacggaataactcagtgaaacttgtgctaataccgtatacgcccttttggggaaagatttatcggagatgactgagcccgcgttgacttagccacttggcggggtagaggccaaccaaggagacgatctatagctggtctgagaggatgatcagccacactgggactgagacacggcgcagacacgtacgggaggcagcggaggggaatagtagataggcggcgcacgcgtagaacagcgtcgccgtgtgagggatgaaggccctagaggtgtaaagctcgttcaacggtgaagataatgacggtaaccgtagaagaagcaccggctaacttcgtgccagcagccgcggtaat

SEQ ID NO: 5286 - DNA, 490 bp, Unknown
  Ascusbbf_1434924, encodes 16S rRNA
agagtttgatcctggctcaggataaacgctggcggcgcacataagacgtgcaagtcgaacgaacttaatcgaaagtttacttttgtagcggttagtggcggactggtgagtaacgcgtaagcaatctgcctctcagaggggaataatagtgagaaatccttgctaataccgcataagctgtgagtatcgcgtgatacacatagaaaacgaacattccactgttagatgagcttgcgtctggttagttagttggtggggtgacggcctaccaagacgatgatcagtagccggactgagaggttaaacggcaacattgggacacagcaacggaccagacgccaacgggaggcagcagtcgggaagattgcgcaatggaggaaacgcggacgcagtgacgccgcgtgcaggaagaaggttgtcggattgtaaactgctttagatagggaagaaaaaaatgacggtaccgatagaataagcaccggctaactac

SEQ ID NO: 5287 - DNA, 490 bp, Unknown
  Ascusbbf_1372965, encodes 16S rRNA
agagtttgatcatggctcaggatgaacgctagctacaggcttaacacatgcaagtcgcggggcatcgcgaagggtagcaatactctttggcggcgaccggcggatgggtgagtaacgcgtatccaacctggcctatctcgggcacagcccctcgaaagagggattaattcccgatgttcccgttagttcgcatgttctttcgggcaaaggtatttatcggatagggatggggatgcgttccattaggcagtcggcggggtaacggcccaccgagcctacgatggataggggttctgagaggaaggccccccaaccgggaatgagaacagggccagaagtccaacgggaggaagcagggaggaatagtggaaaatggcggtaaggcggaaccagccaagtagcgtgggggattacggccctatgggttgtaaactgcttttatatagggataaagtgatctacgtgtaggttttggtaggtactatatgaa

SEQ ID NO: 5288 - DNA, 490 bp, Unknown
  Ascusbbf_1340740, encodes 16S rRNA
agagttgatcatggctcaggacgaacgctggcggcgtgcctaacacatgcaagtcgaacggggattttgtttcggcagaatcctagtggcgaacgggtgagtaacgcgtaggcaacctgccccccggattgggacaacaccccgaaaggggtgctaataccggatacgaagataataccgcatggtgttattttgaaagatgtcctctatttataagctatcgccgggtgatgggcctacgtccgattagctggttggttgggtaacggcctaccaaggcgacgaacggtagccggtttgagtgacgaaacggcagcctgcggaccgagacacggcccagacacctacgggaggcagcaggggggaatctgccgcaatgggcgaaagcctgacggagcaacgccgcgtgggtgaggaagttcgtcggaacgtaaggcccggttgtacatgacgaacgtgctttctatcaacaacgggaagcaatgacggt

SEQ ID NO: 5289 - DNA, 486 bp, Unknown
  Ascusbbf_1373044, encodes 16S rRNA
agagtttgatcatggctcagaacgaacgctggcggcaggtcttaggcatgcaagtcgaacggacgacagagtggcttgccattctgcagttagtggcgcacgagtgagtaacgcgtgtgaaactgcccttcactggggaataacgtctggaaacggacgctactaccgcatccgccctcacggggcaagatttatcggttgtggtttggcccgcgttggattcgctttttggtggggtaatggcctcccaaggcgatgatccttagctgttcttggatgacgatcagccacgctggaaatgagacacggtccagactccgacgggaggcagcagctaagaatattgggcaatggaggaaactctgacctagccatgccgcgtgaatgaagaaggccttcgggttggaaagttctttgagtcatgaagatgatgacagtagtgacagaaaaagcaccggctaacttcgtgccagcagccgcggtaat

SEQ ID NO: 5290 - DNA, 490 bp, Unknown
  Ascusbbf_1434950, encodes 16S rRNA
agagtttgatcctggctcaggatgaacgctagcggcaggcttaacacatgcaagtcgaggggtaacgcggggtagcaatactctggcgacgaccggcgcacgggtgcgtaacgcgtatgcaacctacctgtaacaggggtataacggagagaaatttccactaatcccccatattgttattctttcgcatgttaggataacgaaagcttcggtggttacggatgggcatgcgtgacattagctattaggtaaggtaacggcttaccaaggctacgatgtctagggtatctgagaggggtatccgcaacacaggaaaggagacaccgaccacacacctacgggaggcagcagggaggaatattggtcaatggaaggaagtctgaaccagccatggcgcgtggaggaagaagggcctatgggttgtaaactccttttgtacgagagtaataagggcttagcgaagccagatgagagtagcggacgaataagc

SEQ ID NO: 5291 - DNA, 490 bp, Unknown
  Ascusbbf_1340728, encodes 16S rRNA
agagtttgatcatggctcaggatgaacgctagcggcaggcttaacacatgcaagtcgaggggtaacgcggggtagaaataatttggagaagaaagggggaagggggcgtaacgcgtaggtaatagagagggaataggggtagaaaggagagaaatttccactaagcccccatattgttattctttcgcatgttaggataacgaaagcttcggtggttacggatgggcatgcgtgacattagctagttggtaaggtaacggcttaccaaggcgacgatgtctaggggagctgagaggcttatcccacgaactgtgactgagacacggaccagactcctacgggaggcagcagtgaggaatattggtcaatggacggaagtctgaaccagccatgccgcgtggaggaagaagggcctatgggttgtaaactccttttgttcgagagtaataagaggcttgcgagcctcgatgagagtatcggacgaataagc

SEQ ID NO: 5292 - DNA, 490 bp, Unknown
  Ascusbbf_1372853, encodes 16S rRNA
agagtttgatcatggctcaggatgaacgctagcggcaggcttaacacatgcaagtcgaggggcagcgcggggtagcaatactctggcggcgaccggcggaagggtgcgtaacgcgtgagcaacatgcccgtggcagggggataagcgatggaaacgtcgtctaagaccccgtaacaacagacctcgcatggggtttgtttgaaagcttcggcggccacggattggctcgcgtcccattaggcagttggcggggtaacggcccaccaaaccgacgatgggtaggggttctgagaggaaggtcccccacagtgaaacagggacacggtcccaatccttccggagggaggcgttgaggaaacttggtcaaggggcggagccctaaaccagccaggccgcgttcaggaataaggccctacgggtcgtaaactgcttttgtacgggagcaataagggtcacgagtggcctgaagagagtaccgtacgaataagca

SEQ ID NO: 5293 - DNA, 490 bp, Unknown
  Ascusbbf_1322220, encodes 16S rRNA
agagtttgatcctggctcaggatgaacgctagcggcaggcttaacacatgcaagtcgaggggtaacgcggggtagcactactctgtcgacgaccgtcgcacgggtgcgtagcgcgtatgcaacctacctgtaacaggggtataacggagagaaatttccactcatcccccatattgttagagattcgcatgtttctctaacgaacgcttcgttggttactgatggtcatgcgtgacattagctagttggtaaggtaacggcttaccaaggcgactctgtctagtggagctgggaggcttatcaccagcactggtacggagacacggaccagactcctacgggaggcagcagtgaggaatagtgggcaatggacggaagtctgaaccagccatgcagcgtggaggaagaaggtcctatgggttgtaaactccttttgttcgagagtaagaagaggcgtgcgagcctcgatgagagtatcggacgaataagc

SEQ ID NO: 5294 - DNA, 490 bp, Unknown
  Ascusbbf_1341102, encodes 16S rRNA
agagtttgatcatggctcaggacgaacgctggcggcatgcttcacacatgcaagtcgaacggactgattccttcgggatgaaatttcttatcgaacgggtgagtaatgtatgagcaacctgcctctgtcaacggtataacagttgtaaacgactgctaatacggtataagaccacggcaccgcatggtgctgcggtaaaagttttttcggacatcgatgggctcatatcccattagctagttggtgagataatagcccaccaaggcgacgatgggtagccgagctgagaggctgatcggccacattgggactgaaacacggcccagactcctacgggaggcagcagtggggaagattgggcaatggaggaaacgctgacccagcaatgccgcgtgagcgatgaaggtaattttattgtaaagcgcgtttctcaggaacgaataaagatgacggtacctgaggaataagccccggctaactacgtgccagc

SEQ ID NO: 5295 - DNA, 490 bp, Unknown
  Ascusbbf_1322142, encodes 16S rRNA
agagtttgatcctggctcaggatgaacgctggcggcgtgcttaacacatgcaagtcgaacgaggtacaaggacggatgttttcggacggaagatcttgtactgagtggcggacgggtgagtaacgcgtgggaaacctgccctgttccgggggataccagttggaaacgactgttaataccgcataagcgcacagcaccgtatggcgcagtgtgaaaacatccggaggaataggatggtccagcgtctgattagggagtaggcagggtaacggcctacgaaaccgacgatcagtagccggcctgagatagtgcacagccacatagggacggaggcacgacccaaaatcctacagggggcggcagtcgggagtattgcacaaggggggaaaaccagatgcagcgacgccgcgagagggaagaggtatttcagtatgtaaagctctggcagcagggaagaagatgacggtacctgcaaaagcagccccggcta

SEQ ID NO: 5296 - DNA, 490 bp, Unknown
  Ascusbbf_1373031, encodes 16S rRNA
agagtttgatcctggctcaggatgaacgctagcggcaggcttaacacatgcaagtcgaggggcaacgcggggtagcaatactctggcgacgaccggcccacgggtgcgtaacgcgtatgtaacctacctgtaacaggggtataacggagagaaatttacactaatcccccatattgttattctttcgcatgctaggataaagaacgcttcggtggctacggttgggcatgcgtgacattagttagttggtaaggtaacggcttaccaagccgacgatgtctaggggagctgagaggcttatcccccacactggaactgagacacggaccaaactcctacgggaggcagcagtgaggaatattggtcaatggacgtaaggctgaaccagccatgccgcgtgggggaataaggtcctatgggttgtaaactccttttgttcgggagtaataagggctttgcgaagcccgatgagagtatcggacgaataagc

SEQ ID NO: 5297 - DNA, 490 bp, Unknown
  Ascusbbf_1373020, encodes 16S rRNA
agagtttgatcctggctcaggatgaacgctagctacaggcttaacacatgcaagtcgaggggcagcataacgaaagcttgcttttgttgatggcgaccggcgcacgggtgagtaccgcgtctccaaccttccccttagtagggcatagcccggtgaaagtcggattaataccctatgttttccgtttaggacatctgaagtgtaacaaagatttatcgctaagggatggggctccgtctgtttaggttgttggcgggtaaacggcccaccaagccatagatcaatagggggtctgagaggaaggtcccgcgcagtgggaccgagaaacggaccaaactcctacgggaggcagcagtgaggaatattggtcaatgggcgagagcctgaaccagccaagtagcgtgcaggatgacggccctatgggttgtaaactgcttttgcatgggaataaagtgagggacgtgtccctttttgtatgtaccatgagaat

SEQ ID NO: 5298 - DNA, 490 bp, Unknown
  Ascusbbf_1373027, encodes 16S rRNA
agagtttgatcatggctcaggatgaacgctagctacaggcttaacacatgcaagtcgaggggcagcataacgaaatcttgcttttgttgatggcgaccggcgcacgggtgagtaacgcgtatccaaccttccccttagtagggcatagcccggcgaaagtcggattaataccctatgttttccgttgaggacatctgacgtggaataaagatttatcgctacgggatggggttgcgtctgtttgggttgttgtaggggtaacggcccaccaagccatcgatcagtagtggttctgtgaggaaggtaccccgaactggtacggagacacggaccaaactcgtacgggaggcagcagtgaggaagactggtcaatgggcgagagcctgaaccagccaagtagcgggcaggatgacggccctatgggttgtaaactgcttttgcatgggaataaagtgagggaagtgtccctttttgtatgtaccatgagaat

SEQ ID NO: 5299 - DNA, 490 bp, Unknown
  Ascusbbf_1435063, encodes 16S rRNA
agagtttgatcctggctcaggatgaacgctagctacatgcttaacacatgcaagtcgaggggaaacgatatcgaaagcttccttttgatcggcgtcgaccggcgcacgggtgagttacgcgtctcccacctgcctgtaaattgggcataatccgtggtaacgcggcctaatgtcctatgtgctccgaataggacatcttttttggagtaaagattcatcgtttccggatggggatgcgtctgcttggcttgctggctgggttaagaccccccagggcgacgatcagtaggggttcttagagtaaggtcaacgacattggaaatgagacacaatccaaactgctacggggagcaaaagagaggaatattgggcaatggacgagaatctgaaccagccgagtggcgtgcaggatgacggccgtatgggttgtaaagtggttatatgcggggataaagtgagcaacgcatggtgtattgcaggtaccgcaaga

SEQ ID NO: 5300 - DNA, 490 bp, Unknown
  Ascusbbf_1340762, encodes 16S rRNA
agagtttgatcctggctcaggatgaacgctagcggcaggcttaacacatgcaagtcgcggggtaacgcggggtatcaatactctggcgacgaccggcgcacgggtgcgtaacgcttatgcaacctacctgtaacaggggtataacggagagaaattttcactaatcccccatattgttagagattcgcatgtttctctaacgaaagcttcagtggttccgtatgggcctgcgtaacattagctagttggtaagttaacggcttacaacggcgactatgtctaggggagctgatacgcttatcccacacactgggactgagacacggaccagactcctacgggaggcagcagtgaggaatagtggtcaatggacggaagtctgaaccggccatgccgcgtggaggaagaaggtcctatgggttgtaaactccttttgttcgagagtaataagaggcttgcgagcctcgatgagagtatcggacgaataagc

SEQ ID NO: 5301 - DNA, 490 bp, Unknown
  Ascusbbf_1372861, encodes 16S rRNA
agagtttgatcctggctcaggatgaacgctggctgcgggcttaacacatgcaagtcgaacggacttaactcattcttaacgtttgagagctgttgatggcggactggtgagtaatgtctaattaaccttcctatctgaggggaacaacagttggagacgactgctaataccgcatatgccacgataatcacagtgttcaagtgggaaaggagcaatccgctgataaatggacttctatctgtttagctagttggtggggtaacgccctaccaaggcgacgatcagtagccggactgagaggtgagacggcgacaatgggactgaggtacggaccagactgcaacgggaggcagcagtcgggaaaattgagcaatggaggagagtgcaacgcagtgacgctgcgtgaaggaagaaggttttcggattgtaaatgctttcgaaagggaagaaaaaagacagtacctgaagaataaggaccggctaactacgt

SEQ ID NO: 5302 - DNA, 490 bp, Unknown
  Ascusbbf_1435051, encodes 16S rRNA
agagtttgatcctggctcagaatgaacgctagcgacaggcctaacacatgcaagtcgaggggcagcgcgggagaagcttgcttttcctggcggcgaccggcgcacgggtgcgtaacaggtgtgcaatctgtccatagtcggggaatagcccagcgaaagttggattaatgctccatgtgtcacgaagccgcattactttgtgatgaaacgtaaggacgatgggtgagcaggctgctgttgagatagttggtggggtaacggctcaccaagtcgacgatcagtagtggttctgagaggaaggccccccacatgggaccggagaaccggccaaatcccccacgggaggcagaaggaaggatgattggtcaatgggcgagggcctgaaccagccaagtcgcgtgaagaatgaaggttctagggattgaaaacttcttttgtccgagggtaaaaaggccacgtgtggcttcttgcaagtagtggacgaataagc

SEQ ID NO: 5303 - DNA, 490 bp, Unknown
  Ascusbbf_1436335, encodes 16S rRNA
agagtttgatcatggctcaggatgaacgctagcggcaggcttgacacatgcaagtcgaggggcagcgcggggtagcaatactctggcggcgaccggcgggcgggtgcgtaacgcgtgcgcaacttgcccgtcactggggggtaggcactggaaacggtgtgtaatactcactaacatatggattcacatggatttatattgaaagattagttggtgccggatgggatcgagtaacattagatagtcgggggggtaacggccccccgaggctacgctgtttaggggttgtgagaggaaggtgccccacactggaactgaggcacggtccagactcctacgggaggcagcagtgaggaatattggtcaatgggcggaagcctgaaccagccatgccgcgtgcaggaataaggccctatgggtcgtaaactgcttttccttgagggcaataagggtcacgtgtggcccgatgagagtatcatgggaataagca

SEQ ID NO: 5304 - DNA, 490 bp, Unknown
  Ascusbbf_1341507, encodes 16S rRNA
agagtttgatcctggctcaggataaacgctggcggcgcacataagacatgcaagtcgaacgaacttaatcgaaagtttacttttgaagcggttagtggcggactggtgagtaacgcgtaagcaatctgcctatcagaggggaataacagtgagaaatcattgctaataccgcataagctgtgagtatcgcatgatacaaatagaaaaggagcaatccgcttatagatgagcttgcgtctgattagttggtaggtggggtaacggcctaccaagactatgatcagtagccggactgagaggttatacggcccgattcggactgagatacggcccagactcctacgggagggagcagtcgggaacattgcgaaatggacgaaacgcggacgcagtgacgccgcgtgcaggaagaaggttttcggattgtaaactgcattagatagggaagaaaaaaatgacggtacctttagaataagctccggctaactac

SEQ ID NO: 5305 - DNA, 486 bp, Unknown
  Ascusbbf_1322360, encodes 16S rRNA
agagtttgatcctggctcagaacgaacgctggcggcaggtcttaggcatgcaagtcgaacggacgactgagtggcttgccattctgaagttagtggggcacgagtgagtaacgcgtgggaaactgcccttcactggggaataacgtctggaaacggacgctaataccgcatacgcccgcaatgggaaagatttatatgtgatggatgtgcccgcgttggattagcttgttggttgggtaatggccgaccaaggcgatgatccatacatggtctgagaggacgatcagccacgctggaacttgtgcacgggccagactcgtacggaaggcaggagctaagaatattgggcaatggaggcaacgctgacccagccatgccacgtgaatgaagaaggccttcgggtgggaaagtacttttagtcatgaagatgatgacagtagtgacagaaaaagcaccggctaacttcgtgccagcagccgcggtaat

SEQ ID NO: 5306 - DNA, 490 bp, Unknown
  Ascusbbf_1340850, encodes 16S rRNA
agagtttgatcctggctcaggatgaacgctagcggcaggcttaacacatgcaagtcgaggggtaacgcggggtagcaatactctggcgacgaccggcgcacgggtgcgtaacgcgtatgcaacctacctgtaacaggggtataacggagagaaatttccactaatcccccatattgttattctttcgcatgttaggataacgaaagcttcggtggttacggatgggcatgcgtgacattagctagttggtaaggtaacggcttaccaaggcgacgatgtctaggggagctgagaggcttatcgccaccgctgggactaacacacggaacggactcctaccgcaggcaggagtgcgtagggttggagaaggaacgaaagtcggaacctgccaggacgcgtgaaggaagaaggtcgtatgggttgtaaacgcctttgggtcgtgagtaataagggcatggcgaagcccgatgagagtaccggacgaagaagc

SEQ ID NO: 5307 - DNA, 490 bp, Unknown
  Ascusbbf_1322366, encodes 16S rRNA
agagtttgatcctggctcaggatgaacgctagcggcaggcttaacacatgcaagtcgaggggtaacgcggggtagcaatactctggcgacgacctgcgcacgggtgcgttatgcgtatgccaccttcctgtaacaggggtataacggagacaaatttccactaatcccccatattgttattctttcgcatgttaggataacgaaagcttcggtagttacgcatgggcatgggtaacattagctagtgggaaaggaacgggcttaccaaggcgacgatgtctaggggagctgagaggcttatcccccacactggtactgagacacggaccagaatcctacgggaggcagcagtgaggaatattggtcaatggacggaagtctgaaccagccatgccgcgtggaggaagaaggtcctatgggttgtaaactccttttgttcgagaataataagggctttgcgaagcccgatgagagtaccgtacgaataagc

SEQ ID NO: 5308 - DNA, 490 bp, Unknown
  Ascusbbf_1371844, encodes 16S rRNA
agagtttgatcatggctcaggatgaacgctagcggcaggcttaacacatgcaagtcgaggggtaacgcggggtagcattactctggcgacgaccggcgcacgggtgcgtaacgcgtatgcaacctacctgtaacaggggtataacggagagaaatttccactaatcccccatattgttattctttcgcatgttaggataacgaaagcttcggtggttacggatgggcatgcgttacattagctagttggtaaggtaacggcttaccacggcgaggatgtctaggggggctgagaggcttaacctccacagtggtacgtggacacggaccagactcctacgagaggcaaaagtgaggaataatgggcaatggacggaagtctgaaccagccatgccgcgtggaggaagaaagtcctatgggttgtaaactccttttgttcgagagtaataagaggcttgcgagcctcgatgagagtatcggacgaataagc

SEQ ID NO: 5309 - DNA, 490 bp, Unknown
  Ascusbbf_1436153, encodes 16S rRNA
agagtttgatcctggctcaggatgaacgctggcggcgtgcctaacacatgcaagtcgaacggaaagaattcttcgggattcttccagtggcggacgggtgagtaacgcgtgggtaacctgccccatccaggtgaacaacagctggaaacggctgctaataccgcataagcgcccagtactgcatggtacagtgtgaaaagtttttatcggaatgggatggacccgcgtctgattagcttgttggagggggaacagcccaccaaggcgtcgatcagtagccgacctgagagggtgaccggccagattgagactgagacgcggaccaaactcctacgggggcagcagtggcggatattgcacaatgggcgaaagccagatgcagcgacgccgcgggagtgaggaagtatttcggtatgtaaagctctaacagtagggaagaaaatgacggtacctgactaagaagccccggctaactacgtgccagcagccg

SEQ ID NO: 5310 - DNA, 490 bp, Unknown
  Ascusbbf_1341436, encodes 16S rRNA
agagtttgatcctggctcaggatgaacgctagcgacaggcctaacacatgcaagtcgaggggcagcgcgggagaagcttgcttttcctggcggcgaccggcgcacgggtgcgtaacaggtgtgcaatctgtccatagtcggggaatagcccagcgaacgttggattaatgctccatgtgtcacgaagccgcatgactttgtgatgaaacgtacggactatgggtgagcacgcttctgattagatagttggtgaggtaacggctcaccaagtctacgatcagtaggggttctgagcgggagggcacccacatgggaaatgagcacccgtccaaacgcctccgggaggaagcagtgaggaatattggtcaatgggcgagagcctgaaccagccaagtagcgtgcaggatgacggccctatgggttgtaaactgcttttatacggggataaagtgagggacgtgtccctttttgtaggtaccgtatgaataag

SEQ ID NO: 5311 - DNA, 490 bp, Unknown
  Ascusbbf_1436306, encodes 16S rRNA
agagtttgatcatggtcaggatgaacgctagctacaggcttaacacatgcaagtcgaggggcagcataacgaaagcttgcttttgttgatggcgaccggcgcacgggtgagtaacgcgtatccaaccttccccttagtagggcatagcccggcgaaagtcggattaataccctatgttttccgttgaggacatctgaagtggaacaaagatttatcgctaagggatggggatgcgtctgattaggttgttagcggggtaccggcccaccaagccatcgatcagtaggggttctgagaggaaagtcacatacatgcggactgtggaccggactgaactgctacgggggcgagcagtgaggaatattggtcgatgggcgagagcctgaaccagccaagtagcgtgcaggatgacggccctatgggttgtaaactgcttttgcatgggaataaagtgagggacgtgtccctttttgtatgtaccatgagaata

SEQ ID NO: 5312 - DNA, 490 bp, Unknown
  Ascusbbf_1341433, encodes 16S rRNA
agagtttgatcctggctcagaacgaacgctggcggcaggcttaacacatgcaagtcggacgggaacctattgatagcttgctattgtttgaggcgagtagcgcacgggtgagtaacacgtgggaacataccttatagtgggggataacaattggaaacgactgataataccgcataagtcctaagggagaaaggagcaattggctataagattggcccgcggaagattaggcagttggtggggtaaaggcctaccaaacctacgatctctagctggactgagaggacgaacagccacattgcgcctgagacacggagcagacaccaacgggggtcaacagtggagaatattaagcagtggggtaaagtctggcacagctgcgccgtgtgagggaaacagcttttcgaagtgaaaaactcttggggatgtgaagatgatgacggtagcatctgaagaagcaccggctaactccgtgccagcagccgcggta

SEQ ID NO: 5313 - DNA, 490 bp, Unknown
  Ascusbbf_1340868, encodes 16S rRNA
agagtttgatcatggctcaggatgaacgctagcggcaggcttaacacatgcaagtcgaggggtaacgcggggtagcaatactctggcgacgaccggcgcacgggtgcgtaacgcgtatgcaacctccctctaacagggatgtaacggagagaaatttcaactaatcctccatactcatagagattcgcatgtttctctaatgatagcttcggtgtttacggatggacaggcgtaacattagctagttggtctggtaacggctcaccaaggcgacgatgtctaggggagctggggggctcatcgcccacactggtacggagacacggacaatactcctacgagaggaagcagtgaggaagattggtcaatggacggaagtctgaaccagccaggccgcgtggaggaagacggtcctatgggttgtaaactccttttgttcgagagtaataagaggcttgcgagcctagatgagagtatcggacgaagaagc

SEQ ID NO: 5314 - DNA, 490 bp, Unknown
  Ascusbbf_1322083, encodes 16S rRNA
agagtttgatcctggctcaggatgaacgctagcggcaggcttaacacatgcaagtcgaggggcagcgcggggtagcaatactctggcggcgaccggcggaagggtgcgtaacgcgtaagcaacatgcccgtggcagggggataagcgatggaaacgtcgtctaagaccccgtaacaacagacctcgcatggggtttgtttgaaagcttcggcggccacggattggcccgcgtcccattaggcagttggcggggtaacggcccaccaaaccgacgatgggtaggggttgtgagaggaagggcccgaacgatggaacggacacacgatccacacacttacgcgaggcacaagtgaggaatagtggtcaatggagggaagcctgaaccagccatgccgcgtgcaggaagaaggccctacgggtcgtaaactgcttttgtacgggagcaataagggtcacgagtggcctgatgagagtaccgtacgaataagca

SEQ ID NO: 5315 - DNA, 488 bp, Unknown
  Ascusbbf_1322066, encodes 16S rRNA
agagtttgatcctggctcagaacgaacgctggcggcaggcttaacacatgcaagttgagtgggatcgattagtagctcgctattgatcatgagagcagcgcactggtgagtaacacgtgggaacatactttttggcgggggacaacagctcgaaacgactgctaataccgcataagccctgagggggaaagcttattagccgagagattggcccgcggcagattaggtagtaggtggggtaacggcctacctagccgacgacctctagctggtctgagaggacgatgagccacattggaacgtaggcacgggccagtcacatgctagaggcggcagtggcgcaaagtgggcaatgggtgcaactctgggacagcaatgacacgtgagggaagagggttgtcggggaggaaagctcgttcatacaggaagaggaggacggtacggtgagaagaagcacgggggaacttcgtgccagcagccggggtaat

SEQ ID NO: 5316 - DNA, 490 bp, Unknown
  Ascusbbf_1434931, encodes 16S rRNA
agagtttgatcctggctcaggatgaacgctggcggcgtgcttaacacatgcaagtcgaacggagttatctcgctgaggagtgcttgctcaactcttgagataacttagtggcggacgggtgagtaacgcgtggataacctgccttatactgggggataacacttagaaatcggtgctaataccgcataagcgcacgttcccgcatgggaaagtgtgaaaaactccggtggggtaagatggatccgcgtctgattagagagttggtgaggtaacggcccaccaagtcaacgatcagtagccggcctgggaggttgaacgggcacatagggacaggggcacggcccaaaatcctacgggaggcagcagtgaggaatattgcacgataggggaaacccggatgcagcgccgccgcgtgagtgaagaagtatgtcggtatgtaaagctctatcagcaaggaagaaaaaaatgacggtacttgactaagaagccc

SEQ ID NO: 5317 - DNA, 490 bp, Unknown
  Ascusbbf_1435028, encodes 16S rRNA
agagtttgatcatggctcaggatgaacgctagcggcaggcttaacacatgcaagtcgaggggtaacgcggggtagcaatactctggcgacgaccggcgcacgggtgcgtaacgcgtatgcaacctacctgtaacaggggtataacggagagaaatttccactaatcccccatattgttattctttcgcatgttaggataacgaaagcttcggtggttacggatgggcatgcgtgacagtagctagttggtaaggtaacggcttaccaaggcgacgatgtctaggggagctgagaggcttatcgcgaccactagtaagatgagacggaccagaatacagcgagaggcagcagtgcggaagattggacaatggagggaagtctgaaccagccatgccgcgtggaggaagaaggtccgatgggttgtaaactccttttgttcgagagtaataagaggcttgcgagcctcgatgagagtatcggaagaataagc

SEQ ID NO: 5318 - DNA, 490 bp, Unknown
  Ascusbbf_1435009, encodes 16S rRNA
agagtttgatcctggctcaggatgaacgctagcggcaggcttaacacatgcaagtcgaggggcatcgcggggtagcaataccctggcgtcgaccggcgcaagggtgcgtaacgcgtgagcgacattcccgtcacagggggataaccggcggaaacgccgcctaataacccatatgaggccaggccacatggccgggccttgcaagtccaggcggtgacggattccctcacgaccgattagccagttgggggggcaacggcccacccaggcgacgatcggtaggggttctgagaggaaggccccccaccacgacaataaaccaccgaccatcttccgacgggaggcagcagggaggattgctgggcaaggggaggacgcctgaaccagccacgcggggggcaggaatgcgtccgtacggttcgtgaactgcgtttcgcgcggagcaagaagaggagttcgcccctccgatgagagtacgcgcggaataagc

SEQ ID NO: 5319 - DNA, 162 bp, Unknown
  Ascusbbf_1434976, encodes 16S rRNA
agagtttgatcctggctcaggatcaacgctggcggcgctcacaagacatgcaagcgtgccggaagccggtttacggattgtgaaatgattggggcagggcggcaaagggaccggacctggatggataacaacggctgaagtcgcggacgcggcagcgagacg

SEQ ID NO: 5320 - DNA, 490 bp, Unknown
  Ascusbbf_1371687, encodes 16S rRNA
agagtttgatcatggctcaggacgaacgctggcggcgtgcttaacacatgcaagtcgaacggtaaggccctttcgggggtacacgagtggcgaacgggtgagtaacacgtgggtaatctgccctgcacttcggattaacccggggaactgggtcttatacccggtatttcgccttcattgcctggtgggtgtttggaagtttttcggtgtgggttgagtccgcggcctttccgcgtgtttgttgggtaagggccttcccaggcggcgacgggtagccggccttagagggggatcggccaccctgggactgagacacggcccagactcctacgggaggcagcagtggggaatattgcacaatgggcgaaagcctgatgcagcgacgccgcgtgggggatgacggtcttcggattgtaaacccctttcagtagggacgaagcgcaagtgacggtacctgcagaagaagcaccggccaactacgtgccagcag

SEQ ID NO: 5321 - DNA, 365 bp, Unknown
  Ascusbbf_1322080, encodes 16S rRNA
agagtttgatcatggctcagattgaacgctggcggcaggcctaacacatgcaagtcgagcggatgaagggagcttgctcctggatttagcggcggacgggtgagtaatgcctaggaatctgcctggtagtgggggataacgtccggaaacgggcgctaataccgcatacgtcctacgggaggaagcagtgggccttagtgccttacgctatcaggcctgcctcagtcaggttaggtttgtgaagaaggtcttcggaatgtaaagcactttcagttgggaggaagggttgtagattaatactctgcaattttgacgttaccaacagaataagcaccggctaacttcgtgccagcagccgcggtaat

SEQ ID NO: 5322 - DNA, 486 bp, Unknown
  Ascusbbf_1434987, encodes 16S rRNA
agagtttgatcatggctcagaacgaacgctggcggcaggtcttaggcatgcaagtcgaacggacgacagagtggcttgccattctgaagttagtggcgcacgagggagtaacgcgtgggaaactgcccttcactggggaataacgtctggaaacggacgctaataccgcatacgcccgcaagaggaaagatttatcggtgattgatgtgcacgcgttggattagcttgttggtggggtaatggcctaccaaggcgatgatccatagctggtctgagaagacgatcagccacgctggaactacgagacggaccagacacctacgggaggcagcagcgaagaatattgggcaatggaggaaactctgagctagcaatgccgcgtgaatgaagaaggccttcgggttgaaaagttctattagtcatgaagatgatgacagtagtgacagaaaaagcaccggctaacttcgtgccagcagccgcggtaat

SEQ ID NO: 5323 - DNA, 490 bp, Unknown
  Ascusbbf_1322239, encodes 16S rRNA
agagttgatcatggcacaggatgaacgctggcggcgtgcctaagacaggcaagtcgaacgagggttctcgtcggggaaaccgagtggcgaacgggggaggaacacataggtaatctacctttcagaaggggagacccaagagaaaggtgggctaataccgtatacaatcgtttctccgcatggagatttgatgaaaggggctccaaagcctcgctgttagatgaacctgtggcacattagctagttggtgagataacagcccaccaaggcgaagatgtgtagccgatctgagaggataatcggccacaatgggactgagacacggcccgtactcctacgggaggcagcagtagggcgttttcggcaatgggggaaaccctgaccgagcaacgccgcgtgatttagaaggccctctgggtcgtaagaatctgttgtaaaggagaaatggtagtgggaggaaatgcccattatttgatagtactttattaga

SEQ ID NO: 5324 - DNA, 490 bp, Unknown
  Ascusbbf_1371712, encodes 16S rRNA
agagtttgatcctggctcaggacgaacgctggcggcatgcttaacacatgcaagtcgaacggacggattccttcgggatgaaagttagtggcgaacgggggagtaatgtatgagcaacctgccgctatcaacgggagaacagtgggaaacgacggctaatacggtagaagaccacggcaccgcaggaggcggcggtaaaagatgggtcggatagagatgggcccagatcccatgagctagttggtgagataacagcccaccaaggcgacgaggggtagccgagcggagaggcggatcggccaccttgggactgcaccacggcccagcctcctccgggaggccgccgtggggcctcttgggcactggaggcccctctgcccccgcactgccgcgtgcgtgatgaaggtccttttcttgtcaagctcttttctcaggaacgcatacagatgacggtacctgaggaatccgccccggctaactacgcgccagc

SEQ ID NO: 5325 - DNA, 490 bp, Unknown
  Ascusbbf_1341112, encodes 16S rRNA
agagtttgatcctggctcaggataaacgctggcggcgtacataagacatgcaagtcgaacgaactcaatcgaaagtttacttttgaagcggttagtgccggaccggtgagtaacgcgtaagcaatccgcccatcagaggggaacaacagcgagaaatcatcgccaacaccgcataagctgtgagtatcgcatgacacaaatagaaaaggagcaatccgctgagagatgagcttgcgtctgattagttagttggtggggtaacggcctaccaagacgattatcagtagccggactgagagggtcagcggccacattggggctgggatccgacccagactcctacgggaggcggcagtcggggatattgcgcaatgggggaaacgctgacgcagtgacgccgcgtgcaggaagaaggttttcggattgtaaactgctttagatagggaagaaaaaaatgacggtacctatagaataagctccggctaactac

SEQ ID NO: 5326 - DNA, 490 bp, Unknown
  Ascusbbf_1373071, encodes 16S rRNA
agagtttgatcctggctcaggatgaacgctagcggcaggcttaacacatgcaagtcgaggggcagcgcggggtagcaatactctggcggcgaccggcggaagggtgcgtaacgcgtgagcaacttgcccgtcactgggggataggcactggaaacggtgtgtaatactccataatatatggattcacatggattcatattgaaagattcgttggtgacggatgggctcgcgtaacattagctagtcggcggggtaacggcccaccgaggctacgatatttaggggttctgagaggaaggttgccagtacgggaacgagacaacggaccagactctgacgggaggcagaagggaggaatattggtcaatgggcggaagctggaccaagccatgcggcgggaaggaataaggccctatgggtcgtaaactgcttttcattgagggcaataagggtcacgagtggcccgatgagggtctcaggggaataagca

SEQ ID NO: 5327 - DNA, 468 bp, Unknown
  Ascusbbf_1434818, encodes 16S rRNA
atagtttgatcctggctcagaacgaacgctggcggtaggcttaacacatgcaagtcgagcgccccgcaaggggagcggcagactggtgagtaacgcgtgggaatctacccatctctacggaataactcagggaaacttgtgctaataccgtatacgcccttctggggaaagatttatcggagatggatgagcccgcgttggattagctagttggtggggtaaaggcctaccaaggcgacgatccctagctggtctgagaggatgatcagccacactgggactgagacacggcccagactcatgcgggggggaggagggggggagattggaaaaggggaggcagcctggaacagacatggcggggaaggagtggaggcccgaggggtagaaagcttttttaccggtgaagataatgacggtagtcggggaagaagccccggctaactacgtgccagcagccgcggtaat

SEQ ID NO: 5328 - DNA, 468 bp, Unknown
  Ascusbbf_1373109, encodes 16S rRNA
agagtttgatcatggctcagaacgaacgctggcggcaggcttaacacatgcaagtcgagcgccccgcaaggggagcggcagacgggtgagtaacgcgggggaagcgacccatcgcgacggaagaacgcagggaaacgggggctaataccggagacgccctgcgggggaaagatttatcggagatggaggagcccgcgttggatgagcgagttggtgaggtaaaggctcaccaaggcgacgatccatagcggggccgagaggatgatcagccacactgggactgagacacggcccagacgcctccgggcggcagccgtggggcatcttggccactgggcgcccgcctgctcccgccctgccgcgtgcgtgatgacggccctagggttgtccagctctttcaccggtgacgctaatgccggtacccggagacgccgccccggctaccttcgtgccagcagccgcggtaat

SEQ ID NO: 5329 - DNA, 490 bp, Unknown
  Ascusbbf_1341015, encodes 16S rRNA
agagtttgatcctggctcaggatgaacgctagcggcaggcttaacacatgcaagtcgaggggcagcgcggggtagcaatacttctggcggcgaccggcggaagggtgcgtaacgcgtgagcaacatgcccgtggcagggggatacgcgatggaaacgtcgtctaagaccccgtaacaacagacctcgcatggggtttgttagaaagcttcggcggccacggcttggctcgcgtcccattaggcagtttgcggggtaccggcccaccaaaccgccggggggtcgggggtcttagcggaaggtcaccagcagtggaactgagacacggtccatactcctgcgggaggcagcagggaggaatattggtcaatgggcggaagcctgaaccagccatgccgcgggcaggaagaaggccctacgggtcgtaaactgcttttgtacgggagcaataagggtcacgagtggcctgatgagagtaccgtacgaataagc

SEQ ID NO: 5330 - DNA, 490 bp, Unknown
  Ascusbbf_1373090, encodes 16S rRNA
agagtttgatcctggctcaggataaacgctggcggcgcacataagacatgcaagtcgaacggacttaaatcattgttaacgattgagagcggttagtgggggagtggtgagtaatgtataggtaatgtgcgtatgagaggggaacaacaggtggaaacgactgataatagcgcatatgccacgagaatcacatgggtcaagtggggaaggaggaaaccgctgaaagatcgacttatatatgaataagaagatggtggggtaacagcataccaaggcgacgagcagtagccggactgagaggttaaccggccaaattgggactgagctacggcccagactacgacggaaggcagcagacgggaatattgcgcaatggaggatactctgacgcagtgacgccgcgtgcaagaagaaggttttcggattgtaaactgctttagacagggaagaaaaaagacagtacctgttgaataagcaccggctaactacg

SEQ ID NO: 5331 - DNA, 490 bp, Unknown
  Ascusbbf_1341006, encodes 16S rRNA
agagtttgatcatggctcaggatcaacgctggcggcgcacataacacacgcaagtcgaacggacttaactcattcttaacgcttgagagcgggtagtggcggactgttgattactgtattacaaacctccctatcagaggggaacaacagttggaaacgactgttaatcccccttatgccacgagaatcacatggttcaagtgggaaaggatcaatccgcttttagatggaattatatctgctgagctagttgttggggtcacggcctaccaaggcgacgatcagttgccggactgagaggttaagaagccacactgggactgaggtacggaacagactcctacggtgggcagcagtcgggaatattgcgcaatggaggaaactctgacgcagggacgccgcgtgcaggaagaaggttttcggattgtagactgctgtagacagggaagaaaaaagacagtacctgtagaataagctccggctaactacg

SEQ ID NO: 5332 - DNA, 490 bp, Unknown
  Ascusbbf_1324874, encodes 16S rRNA
agagtttgatcatggctcaggatgaacgctagcggcaggcttaacacatgcaagtcgaggggcagcgcggggtagcaataccctggcggcgaccggcggaagggtgcgtaacgcgtgagcaacttgcccgtcactgggggataggcactggcaacggtgagtaatactcaataacatatggatgcacatggagttatattataagattcgttggtgacggatggtctcgcgtaacgttagctagtcggcggggtaacggcacaccgaggctacgaggtttaggggttctgggaggaaggtccccacccgtggaactgggacacggtccagactcctacgggaggcagcagtgaggaatattggtcaatgggcggaagcctgaaccagccatgccgcgtgcaggaataaggccctatgggtcgtaaactgcttttccttgagggcaataaggatcacgtgtggcccgatgagagtatcaggggaataagca

SEQ ID NO: 5333 - DNA, 490 bp, Unknown
  Ascusbbf_1373117, encodes 16S rRNA
agagtttgatcctggctcaggatgaacgctagcggcaggcttaacacatgcaagtcgaggggcagcgcggggtagcactatcctggcggcgaccggcggaagggtgcgtaacgcgtgagcaacttgcccgtcactggaggataggcactggaaacggtgtgtaatactccataacatcagttttcgcatgaagctttattgaaagattcattggtgacggatgggctcgcgagacattagctagtcggcggggtaccggcccaccgaggctacgatgtctaggggttctgagaggaaggtcacgcacacgggacctgagacacggcccagaagcctacgggaggcagcagtgaggaatattggtcaatgggcggaagcctgaaccagccatgccgcgtgaaggaataaggccctatgggtcggaaacttcttttccgtgggggcaagaaggatcacgcgtggtccgatgagagtaccaggggaataagca

SEQ ID NO: 5334 - DNA, 486 bp, Unknown
  Ascusbbf_1434811, encodes 16S rRNA
agagtttgatcctggctcagaacgaacgctggcggcaggtcttaggcatgcaagtcgaacggacgacagagtggcttgccattcttcagttagtggcgcacgagtgcgtaacgcgtgggaaactgcccttcactggggaataacgtctggaaacggacgctaataccgcatcctcccgcaatgggaaggatttatcggtgatggatgtgcccgcgttggattagctttttggtggggtaatggcctaccacggcgatgatccatagctggtctgagaggacgatcagccacgctggaactgagacacgggccagaatgctacgggaggcagcagctaagaatattgggcaatggaggaaactctgacccagccatgccgcgtgaatgaagaaggccttcggggtgtaaagttcttggagtcatgaagatgatgacagtagtgacagaaaaagcaccggctaacttcgtgccagcagccgcggtaat

SEQ ID NO: 5335 - DNA, 490 bp, Unknown
  Ascusbbf_1324757, encodes 16S rRNA
agagtttgatcatggctcaggatgaacgctggcggcgtgcttaacacatgcaagtcgaacggggattatttcattgaagcttcggcagatctggtttaatcctagtggcggacgggtgagtaacgcgcgtgtaacctgccttatacagggggataacagtcagaaatggctgctaataccgcataagcgcacagggtcgcatgatccagtgtgaaaaactgaggtggtataagatgaaccggcgttggattagccagttggcagggtaacggcctaccaaagcgacgatccatggccggccggagggggtgaccggcaacatggggacgggcaaagggcccaaactccgacggggggcagcagtggggaatattggacaatgggggaaaccctgacgcagcgacgccgcgggaaggaaaaagtatctcggtatgtaaacttctatcagcagggaagaaaatgacggtacctgactaagaagccccggcta

SEQ ID NO: 5336 - DNA, 490 bp, Unknown
  Ascusbbf_1434823, encodes 16S rRNA
agagtttgatcctggctcaggataaacgctggcggcgcacataagacatgcaagtcgaacggacttaactcattcttaacgattgagagcggttagtggcggactggtgattaatgtataagtaacctgcctatcagatgggaaccacagttggaaacgacttctaatcccgcatatgccacgagaatcacatcgttccagtgggaaaggagcaatccgctaatagatggacttatatctgatgagctagtaggaggggtaacggcctaccaaggcgcagatcagtagccggactgagagggtaaacgaccacattgggactgagagacggacccggatcctacgggaggcagcagtcgggaagattgcgcaatggaggaaacgctgacgcagtgacggcgcgtgaaggaagaagggtttcggattgtaaacggatttagaaagggaagaaaaaagacagtaccgggagaataagcaccggctaactacg

SEQ ID NO: 5337 - DNA, 490 bp, Unknown
  Ascusbbf_1434822, encodes 16S rRNA
agagtttgatcctggctcaggatgaacgctagcggcaggcttaacacatgcaagtcgaggggcagcgcggggtagcactctcctggcggcgaccggcggaagggtgcgtaacgcgtgagcaacttgcccgtccctggaggataggcactggaaacggtgtgtaatactccataacataagttttcgcatgaagatttattgaaagattcattggtgacggatgggctcgcgagacattagctagtcggcggggtaacggcccaccgaggctacgatgtctaggggttctgagaggaaggtcacccacaacggcactgggacacggtccggactcctacgggaggcagcagtgaggaatattgggcaaggggcggaagcctgaaccagccaggccgcgtgaaggaagaaggccctatgggtcggaaacttcttttccttgggggcaataaggagcacgcgtggtccgatgagagtaccaggggaataagca

SEQ ID NO: 5338 - DNA, 488 bp, Unknown
  Ascusbbf_1324818, encodes 16S rRNA
agagtttgatcatggctcagaacgaacgctggtggcaggcttaacacatgcaagttgagcgggattaattgatagcttgctatttattatgagagcagcgcactggtgagtaacacgtgggaacatacctttttgtggtggacaacagttggaaacgactgctaataccgcataagccctaagggggaaggattaattgccgaaaggttgtcccgcggaagattaggtagtaggtggggtaacggcctacctaggcggctatctatagctgatctgagaggacgagcagccacattggaactgagacacggtccagactcctacgggaggcagcagggaggaagattgggcaatggaggaaacacggacccagctaggccgcgtgagtgaagaaggttttcggattgtaaagctctgtaagacgggaagaggatgacggtaccgtaagaagaagcaccggctaacttcgtgccagcagccgcggtaat

SEQ ID NO: 5339 - DNA, 490 bp, Unknown
  Ascusbbf_1341045, encodes 16S rRNA
agagtttgatcctggctcaggatgaacgctagcggcaggcttaacacatgcaagtcgaggggtaacgcggggtagcactactcttgcgacgaccggcgcacgggtgcgtaacgcgtatgcaacctccctgtaaccgggttatcacggagataaatttccactaatcccccatattgttattctttcgcatgttaggataacgaaagcttcttttgttacggatgggcatgcgtgacattagctagtttatacggtaacggcttaccaaggcgacgattggtaggggagctgagaggcttatcaccaacactggtactgagacagggaccagactcctacgggaggcagcagtgaggaatattggtcaatggacggaagtctgaaccagccatgccgcgtggaggaagaaggtcctatgggttgtaaactccttttggtcgagagtaataagaggcttgcgagcctcgatgagagtatcggacgaataagc

SEQ ID NO: 5340 - DNA, 490 bp, Unknown
  Ascusbbf_1342317, encodes 16S rRNA
agagtttgatcctggctcaggataaacgctggcggcgcacataagacatgcaagtcgaacggacttaactcattcttaacgcttgctagcggttagtggcggactggttagtaatgtataattaacctgcctatccgaggggaacaacagttggaaacgcctgctaataccgcatattccccgataatcacatggttcaagtgggcaaggatcactccgctgatagatggacgtatatctgattagctatttggtggggtaaaggcctaccaaggcgacgatcagtagccggactgagaggtgaaaaggccacattgggactgagagacggcccagactcctacgggaggcagcagtcgggaatattgcgcaagggaggaaactctgacgcagtgacgccgcgtgcaggaagaaggttttcggagtgtaaaatgctttagacagggaagaaaaaagacagtacctgtagaataagctccggctaactacg

SEQ ID NO: 5341 - DNA, 490 bp, Unknown
  Ascusbbf_1372519, encodes 16S rRNA
agagtttgatcctggctcaggatgaacgctagcggcaggcttaacacatgcaagtcgaggggcagcgcggggtagcactactctggctgctaccggcggaagggtgcgtaacgcgtgagcaacttgcccttccctgggtgataggcactggcaacggtgtgtaatactccatcacatatggattcacatggattcatattgaaagattcgttgttgacggattggctcgcgtaacattagctagtcggcgtggtaacggcccaccgaggctacgatgtttaggtgttctgagaggaaggtcacccacactggaacggagacacggtacagactcctacgggaggcagcagtgaggaatagtggtaaatgggaggaagcctgaaccagccatgcagcgtgaaggaataaggccctatgggtcgtaaactgcttttccttgagggcaataaggggcacgtgtggcccgatgagagtatcaggggaataagca

SEQ ID NO: 5342 - DNA, 490 bp, Unknown
  Ascusbbf_1435485, encodes 16S rRNA
agagtttgatcatggctcaggatgaacgctggcggcgtgcttaacacatgcaagtcgaacggagttatctcgctgaggagagcttgctcaaatcttgagataacttagtggcggacgggtgagtaacgcgtggataacctgccttataccgggggataacacttagaaataggtgctaataccgcataagcgcacgatctcgcatgggaaagtgtgaaaaaccccggtggtataagatggatccgcgtctgactagatagttggtgaggtaacggcccacaaagtcaacgatcagtagccggccagacagggtgaacggccagaatgggactgagacacgacccagacgcctgcgggatgcggcaatggggaaaattgcacaatgggcgagaccctgatacggcgacgccgcgtgggtgaagaaatatttcggtatgtaaagctctatcagcaaggaagaaaaaaatgacggtacttgactaagaagccc

SEQ ID NO: 5343 - DNA, 490 bp, Unknown
  Ascusbbf_1435453, encodes 16S rRNA
agagtttgatcctggctcaggatgaacgctggcggcgtgcttaacacatgcaagtcgaacggagttatctcgctgaggagagcttgctcaaatcttgagataacttagtggcggacgggtgagtaacgcgtggataacctgccttataccgggggataacacttagaaataggtgctactaccgcataagcgcacgatcccgcatgggaaagtgtgaaaaactccggtggtataagatggatccgcgtctgattagatagttggtgaggtaacggcccaccaagtcaacgatcagtagccggactgagaggagtaaaggccacatagggactgagacacggcccaaacgcctacgggaggaagcagtggggactattgcaaaatgggggaaaccctggtgcaacgacgccgcgtgagagaagaagtatgtcggtatgtaaagctctatcagcaaggaagaaaaaaatgagggtacatgacgaagaagccc

SEQ ID NO: 5344 - DNA, 487 bp, Unknown
  Ascusbbf_1324463, encodes 16S rRNA
agagtttgatcctggctcaaaacgaacgctggcggcaggcttaacacatgcaagtcgagcgggagtgagggagagcttgctattgatcatgagagcagcgcacgggtgagaaacacgtgggaacataccttgtggggggggacaacaggcggaaacgactgcgaataccgcataagccctgagggggaaagattaattgccgagagattggcccgcggaagattaggtagtaggtggggtaacggcctacctagccgacgatctatagctggtctgagaggacgatcagccacattggaacggagacacggtccagactcctacgggaggcagcagtgaggaatagtgggcaatggagggaactctgacccagccatgccgcgtgagtgaagaaggttttcggattgtaaagctctttcagacgggaagatgaggacggtaccgtcagaagaagcaccggctaacttcgtgccagcagccgcggtat

SEQ ID NO: 5345 - DNA, 490 bp, Unknown
  Ascusbbf_1373179, encodes 16S rRNA
agagtttgatcctggctcaggatgaacgctagctacaggcttaacacatgcaagtcgaggggcagcattaaagtttgcttgcaaactttagatggcgaccggcgcacgggtgagtaacacgtatccagcctgccgataactcggggatagcctttcgaaagaaagattaatacccgatggcatatttttaccgcatggtgaaactattaaagaatttcggttattgatggggatgcgttccattaggcagttggtgaggtaacggctcaccaaactttcgatggataggggttctgagaggaacgtcacgcacaatggagctgagacaaggtccaaactctgacgggaggaagcagtgaggaatattggtccatgggcgcgagcctgaaccagccaagtagcgtgaaggatgacggcccgatgggttgtaaacttcttttatatgggaataaagtttggtatgcataccattttgtatgtaccatatgaa

SEQ ID NO: 5346 - DNA, 490 bp, Unknown
  Ascusbbf_1435457, encodes 16S rRNA
agagtttgatcctggctcaggatgaacgctggcggcgtgcttaacacatgcaagtcgaacggagttatctcgctgaggagcgcttgctcacatcttgagataacttagtggcggacgggtgagtaacgcgcggataacctgccttataccgggggataacacttagaaataggtgctaataccgcataagcgcacgatcccgcatgggaaagtgtgaaaaaatccggtggtatacgatggatccgcgtgtgattagatagttggtgaggtaacggccaaccaagtcaacgatcagtagccggccagagaggtgtaacggacacattggaactgagacacgggccaaacgcctacgggaggcagcagtggggaatagtgcacaatgggggaaacccggatgcagcgacgccgcgtgagtgaagaagtatttcggtatgtaaagctctatcagcaaggaagaaaaaaatgacggtacttgactaagaagccc

SEQ ID NO: 5347 - DNA, 490 bp, Unknown
  Ascusbbf_1324806, encodes 16S rRNA
agagtttgatcctggctcaggatgaacgctagctacaggcttaacacatgcaagtcgaggggcagcattaaagtttgcttgcaaactttagatggcgaccggcgcacgggtgagtaacacgtatccagcctgccgataactcggggatagcctttcgaaagaaagattaatacccgatggcatatttttaccgcatggtgaaactattaaagaatttcggttattgatggggatgcgttccattaggcagttggtgaggtaacggctcaccaaactttcgatggataggggttctgagaggtggggacccatgatgggatgagagaaacggaccaaactcctacgggaggcagcagtgaggaagatgggtcaatgggcgcgagcgtgaaccagacaagtagcgtgaaggatgacggccctatgggttgtaaacttcttttatatgggaataaagtttggtaggcataccatgttgtatgtaccatatgaa

SEQ ID NO: 5348 - DNA, 488 bp, Unknown
  Ascusbbf_1324799, encodes 16S rRNA
agagtttgatcctggctcagaacgaacgctggcggcaggcttaacacatgcaagttgagcgggattgatttatcgcttgctattgatcatgagagcagcgcactggtgagtaacacgtgggaacataccttttggtgggttacaacagttggaaacgactgctaatacctcataatccctgagggggaaagattaattaccgagagattggcccgcggaagactcggtagtagtgggggtaacggcctacctagcctacgatctatagctggtctgagaggactatcagccacattggaactacgacacggtccagactcctacgggaggcggaagtgaggaatattgggcaatggagggaactctgacgcagccatgccgcgtgagtgaagaaggttttcggattgtaaagctctttcagacgggaagatgatgacggtaccgtcagaagaagcaccggctaacttcgtgccagcagccgcggtaat

SEQ ID NO: 5349 - DNA, 486 bp, Unknown
  Ascusbbf_1324798, encodes 16S rRNA
agagtttgatcctggctcagaacgaacgctggcggcaggtcttaggcacgcaagtcgaacggacgacagagtggcttgccattctgaagttagtggcgcacgagtgagtaacgcgtgggaaactgcccttccctggggaataacgtctggaaacggacgctactaccgcatacgcccgcaaggggaaagatttagcggtgattgatgtgcccgcgtaggattagcttgttggtggggtactggcctaccaaggcgatgatccctagctggtctgagaggacgatcagccatgctggaacttagacacggtccagacgcctacgggaggaagcagctaagaatattgggcaagggaggaaactctgacccagccatgccgcgggaatgaagaaggcctgcgggttggaaagttctgttagtcatgaagatgatgacagtagtgacagaaaaagcaccggctaacttcgtgccagcagccgcggtaat

SEQ ID NO: 5350 - DNA, 490 bp, Unknown
  Ascusbbf_1324805, encodes 16S rRNA
agagtttgatcatggctcaggatgaacgctagctacaggcttaacacatgcaagtcgaggggcagcataacgaaagcttgcttttgttgatggcgaccggcgcacgggtgagtaacgcgtatccaaccttccccttagtagggcatagcccggcgaaagtcggattaataccctatgttttccgttgaggacatctgaagtggaataaagatttatcgctaagggatggggatgcgtctgattagattgttggcggggtaacggcccaccaagccatcgatcagtaggggttctgagaggaagggcaccgacattggtacggagacaaggaacaaactccgaagagaggcagaagtgaggaagattggtaaatgggcgagagcctgaaccagccaagtcgcgggaaggatgaaggttttcggagtgtaaacttcttttattaaggacgaaaaatgacggtacttaatgaataagctccggctaactacgt

SEQ ID NO: 5351 - DNA, 490 bp, Unknown
  Ascusbbf_1372898, encodes 16S rRNA
agagtttgatcctggctcaggatgaacgctggcggcgcacataacacatgcaagtcgaacgaacttaatcgaacgtttacttttgaagcggttagtggcggactggtgagtaacgcgtaagcaatctgcctatcagaggggtataacagtgagaaatcattgctaataccgcataatctgtgagtatcccatgatacaaattgaaaaggagcaatcagctgttagatgtgcttgcgtctgattcgttagttggttgggtaacggcctacccagacgatgatcagtagccggactgagaggttaaacggccacattggaactgagatacggaccagactcctacgggaggcagcagtcgggaatattgcgaaatggaggaaaccctgacgcagtgacgccgcgtgcaggaagaaggttttcggattgtaaactgctttagatagggaagaaaaaaatgacggtacctctagaataagctccggctaactac

SEQ ID NO: 5352 - DNA, 490 bp, Unknown
  Ascusbbf_1322178, encodes 16S rRNA
agagtttgatcatggctcaggatgaacgctggcggcgtgcttaacacatgcaagtcgaacgaagcacttaatcggatttcttcggaatgaaagttttgtgactgagtggcggacgggtgagtaacgcgtgggtaacctgcctcatacagggggataacagttagaaatgactgctaataccgcataagaccacagcttcgcatgaagcaggggtaaaaactccggtggtatgagatggacccgcgtctgattaggtagttggtgaggtaacggcccaccaagccgactatcagtagccgaaccgagaaggtgaacggacaaagtgggaacaggaaaacgccccaacgccgtacggaggcaggcggtgggaataatggcacatgggggaaaccctgatgcagcgacgccgcgtgagcgatgaagtatttcggtatgtaaagctctatcagcagggaagaaaaaagacggtacctgactaagaagcaccggc

SEQ ID NO: 5353 - DNA, 490 bp, Unknown
  Ascusbbf_1341079, encodes 16S rRNA
agagtttgatcatggctcaggatgaacgctagctacaggcttaacacatgcaagtcgaggggcagcataacgaaagcttgcttttgttgatggcgaccggcgcacgggtgagtaacccgtatccaaccttccccttagtagggcaaggccggccgaaagtgggattaataccctaggttttccgttaggacaatcggaggggaaaaaaggtttaatgcctaagggtgggggatgcgtcggatcagttgtttgcgggggtaagggcccaccaagccatcgataagaaggggttctgagaggaaggtcccccacattggtactgagacacggaccaaactcctacgggaggcagcagtgaggaatattggtcaatgggcgagagcctgaaccagccaagtagcgtgcaggatgacggccctatgggttgtaaactgcttttgcatgggaataaagtgagggacgtgtccctttttgtatgtaccatgagaat

SEQ ID NO: 5354 - DNA, 490 bp, Unknown
  Ascusbbf_1372843, encodes 16S rRNA
agagtttgatcctggctcaggatgaacgctggcggcgtgcttaacacatgcaagtcgaacggagttatctcgctgaggagagcttgctcaaatcttgagataacttagtggcggacgggtgagtaacgcgtggataacctgccttataccgggggataacacttagaaataggtgctaataccgcataagcgcacgatcccgcatgggaaagtgtgaaaaactccggtggtaaaagatggatccgcgtctgatcagatagttggtgaggtaacggcccaccaagtcaacgatcagtagccgccctgagcaggtgaccgaccaaattgggactgggaaccggccccaactcctccggaaggcagaagtggcgagtattgcacaatgggggaaacccggatgcagcgacgccgcgtgagtgaagaagtatttcggtatgtaaagctctatcagcaaggaagaaaaaaatgacggtacttgactaagaagccc

SEQ ID NO: 5355 - DNA, 467 bp, Unknown
  Ascusbbf_1341105, encodes 16S rRNA
agagtttgatcctggctcagaacgaacgctggcggcaggcttaacacatgcaagtcgagcgccccgcatttggagcggcagttgggtgagtaacgaccgggaacctacccatttctacggaaccaaccatgccaacttgtgctaataccgcatacgccctccgggggatagctttagtggtgatggttgagcccgcgtggaattacgtagttgcggcggtaaaggctcagtatggctacgatcaattgctggtctgagaggatgaccagccacactgggactgagacacggcccagacgcatacgggggcaagcagtggggaagataggacaatgagcgcagtcctgatccagccaggccgggggagtgaagaaggccctagggttgtaaaactcatgcaccggtgaagataaggacggtaaccagagaagaagccccggcaaacttggggccagagccgcggtaat

SEQ ID NO: 5356 - DNA, 486 bp, Unknown
  Ascusbbf_1434914, encodes 16S rRNA
agagtttgatcctggctcagaacgaacgctggcggcaggtcttaggcatgcaagtcgaacggtcgccagagtggcttgccattctgaagttagtggcgcacgagtgagtaacgcgtgtgaaactgcccttcactgggggataacgtctggaaacggacgctaatacctcatacgcccgccaggggaaagatttatcggcgacgtatgtgcccgcgttggattagattgttgttggggtaatggcctacacaggcgatgatccatcgctggtccgagaggacgatcatccacgctggaactgagacacggtccagactcatacgggaggcagcagctaagaatagtgggcaagggaggaaactctgacccagccatgccgcgtgaatgaagaaggccttcggggtgtaaagttcttttagtcatgaagatgatgacagtagtgacagaaaaagcaccggctaacttcgtgccagcagccgcggtaat

SEQ ID NO: 5357 - DNA, 490 bp, Unknown
  Ascusbbf_1341116, encodes 16S rRNA
agagtttgatcatggctcaggacgaacgctggcggcgtgcctaacacatgcaagtcgagcggagccaatcggacaatcctttcggggcgcgcttgaggccgcttagtggcggacgggtgagtaacgcgcgagtaacctgcccataagagggggataacacagagaaatctgcgctaatacccaatattgaattagaatcgcatggttttaatttgacagatttatcgcttatggatggactcgcgtctgattagatagctggcggggcaacggcccaccaagtcgacgatcagtagccgaacgacgaggaggatcggccacatatggactggggcacggcccaggatcctacgggaggcagcagtgggggagaatgcgcaatgggggaaaccctgacgcagcaacgccgcgtgaaggaagaaggctgtcgggttgtaaacttctgttcttagggaagaagacagtgacggtacctaaggagcaagtcacg

SEQ ID NO: 5358 - DNA, 490 bp, Unknown
  Ascusbbf_1341062, encodes 16S rRNA
agagtttgatcctggctcaggatgaacgctggctgcgtgcctaacacatgcaagtcgaacggaaaggattcttcggaattctttcagtggcggacgggtgcgtaacgcgtgggtaacctgccccatacaggggaacaacagctggaaacggctgctaataccgcataagcgcacagtactgcatggtacagtgtgaaaagattttagcggtattggatggacgcgcgtctgattagctagtttggggtgtaacggcccaccaagcccacgataagtagccgaactgggggggtgaccagcaacatgggtactgagacacggcccaaacacctacgggaggcagcagtgggggatatgacacaatgggcgaaagcctgatgcagcgacgccgcgtgagtgaggaagtatttcggtacgtaaagctctatcagcagggaagaaaatgacggtacctgactaagaagccccggctaactacgtgccagcagcc

SEQ ID NO: 5359 - DNA, 490 bp, Unknown
  Ascusbbf_1341127, encodes 16S rRNA
agagttgatcatggctcaggatgaacgctggcggcgtgcttaacacatgcaagtcgaacggagttatctcgctgaggagagcttgctcaaatcttgagataacttagtggcggacgggtgagtaacgcgtggataacctgccttataccgggggataacacttagaaataggtgctaataccgcataagcgcacgatcccgcatgggaaagtgtgaaaaactccggtggtataagatggatccgcgtctgattagatagttggtgaggtaacggcccaccaagtcaacgatcagtagccggactgagagggggaacagccacattgggactgggaaacgggcccaaatcctacggggggcagcaatggggaataattcacaatggggggaaacccggaggagggaaggcgcgggaggggagaaataattccggtagtaaaggtctaacaacaaggaaagaaaaaaatgacggtacttgactaagaagccc

SEQ ID NO: 5360 - DNA, 488 bp, Unknown
  Ascusbbf_1324653, encodes 16S rRNA
agagtttgatcatggctcagaacgaacgctggcggcaggcttaacacatgcaagttgagcgggattaattgatagcttgctattaattatgagatcagcgcactggttagtaacacgtgggaacataccttttggtggtggacaacagttggaaacgactgctaataccgcataatccctaaggggtaaatattaattgccgaaagattggcccgcggaagattaggtagtaggtgtggtaacggcctacctagccgacgatctatagctggtctgagagtactatcagccacattggaacggagaaagggtccagactcctacgggaggcagcagtgaggaatattgggcaatggaggcaacgctgacccagacatgccgcgggagtgaagaaggttttcggattgtaaagctttttcagacgggaagatgatgacggtaccgtcagaagaagcaccggctaacttcgtgccagcagccgcggtaat

SEQ ID NO: 5361 - DNA, 490 bp, Unknown
  Ascusbbf_1373276, encodes 16S rRNA
agagtttgatcctggctcaggatgaacgctagctacaggcttaacacatgcaagtcgaggggcagcataacgaaagcttgcttttgttgatggcgaccggcgcacgggtgagtaacgcgtatccaaccttccccttagtagggcatagcccggcgaaagtcggcttaataccctatgttttccgttgaggacatctgaagtggaataaagatttatcgctaagggatggggatgcgtctgattatgttgttggcggggtcacggcccaccaagccatcgatcagtaggggttctgagaggacggtctcgcacatgggtacggtgagacagaccaaaatccgaaggggggcagcagtgaggaagattggtcaaggggcgagtgcctgaaccagccaagtagcgtgcaggaggacggccgtatgggttgtaaactgcttttgcatgggaataaagtgagggacgtggccctttttgtctgtaccatgagaat

SEQ ID NO: 5362 - DNA, 490 bp, Unknown
  Ascusbbf_1340989, encodes 16S rRNA
agagtttgatcctggctcaggatgaacgctagcggcaggcttaacacatgcaagtcgaggggcagcgcggggtagcaatactctggcggcgaccggcggaagggtgcgtaacgcgtgagcaacttgcccgtcactgggggataggcactggaaacggtgtgtaatactccataacatatggattcacatggattcatattgaaagattcgttggtgacggatgggctcgcgtaacattagctagtcggcggggtaacggcccaccgaggctacgatgtttaggggttctgagaggaaggtcacgcgctgtggagatgagaagcggtccaggctccgacggaaggcagcagtgaggaatattggtcaatggacggaagcctgaaccagccatgccgcgtgcaggaataaggccctatgggtcgtaaactgcttttccttgagagaaataagggtcacgtgtggtccgatgagagtatcaggggaataagca

SEQ ID NO: 5363 - DNA, 490 bp, Unknown
  Ascusbbf_1324670, encodes 16S rRNA
agagtttgatcctggctcagaacgaacgctggcggcaggcttaacacatgcaagttggacgggaatcgattgatagcttgctattgattgaggagagtagcgcacgggtgagtaacacgtgggaacataccttatagtgggggataacaattggaaacgattgataataccgcataagtcctaagggagaaaggagtaattcgctataagattggcccgcggaagattaggcagttggtggggtaaaggcctaccacacctacgctctatagctggtctgagaggacgataagccacattggtactacgacacggcccaatgagcaacagtgggcagcagtgaggaatattgggcaacggagtcaaccctgacacagccacgccgcgggagtgaagaaggttttcgacgtgtaaagcgcgttcggaggtgaagatgatgaaggtagcatctaaagaagccccggcaaacttcgtgccagcagccgcggta

SEQ ID NO: 5364 - DNA, 490 bp, Unknown
  Ascusbbf_1324756, encodes 16S rRNA
agagtttgatcctggctcagggtgaacgctagcggcaggcttaacacatgcaagtcgaggggcagcgcggggtagcaatactctgtcggcgaccggcgcacgggtgcgtaacgcgtgagcaacttgcccgtcactgggggttaggcactggcaacggtgtgtaataccccataatatatggattcacatggattcatattgaaagattcgttggtgacggatgggctcgcgtaacattggctattctgcggggtaacggcccaccgaggctacgatgtttagtggttctgcgaggaaaggcccccacactggaactgagacacggtccagactcctacgggaggcagcagtgaggaatattggtcaatgggcggaagcctgaaccagccatgcagcgtgcaggaataaggccctatgggtcgtaaactgcttttccttgagggcaataagggtcacgtgtggcccgatgagagtatcaggggaataagca

SEQ ID NO: 5365 - DNA, 490 bp, Unknown
  Ascusbbf_1324754, encodes 16S rRNA
agagtttgatcatggctcaggataaacgctggcggcgcacataagacatgcaagtcgaacggccttaactcattcttcacgattgagagcggttagtggcggaccggtgagtaatgtataagtaacctgcctatcagaggggaacaacagttggaaacgactgctaataccgcatatgccacgagaatcacatggttcaagtgggaaaggagcaatccgctgatagatggacttatatctgattagctagttggtggggtaacggcctaccaaggcgacgatcagtagccggactgagaggtgaaacggccacaatgggactgagatacggaccagactccgacgggaagaagcagtcggggatattgcgcaatggaggaaactctgacgcagtgacgccgagggcaggaagaaggttttcggattgtaaactgctttagaaagggaagaaaaaagacagtaccgggagaataagctccggctaactacg

SEQ ID NO: 5366 - DNA, 490 bp, Unknown
  Ascusbbf_1324752, encodes 16S rRNA
agagtttgatcctggctcaggatgaacgctagcggcaggcttaacacatgcaagtcgaggggcagcgcggggtagcaatactctggcggcgaccggcggaagggggcgtaacgcgtgagcaacaggcccgtggcagggggataagcgagggatacggcggctaagaccccgtaacaacagacctcgcatggggtgtgtttgaaagcttcggcggccacggattggctcgcgtcccattaggcagttggcggggtaacggcccaccaaaccgacgatggggagggggtctgcgaggcaggtacaacacactggaacggagtctcgctccatactactacgggcggcagccgtgcggactattggtccctgggcggcagcctgccccagccctgccgcgtgcaggaataaggccctacgggtcgtaaactgcttttgtacgggagcaatccgggtcacgagtggcctgctgagcgtaccgtacgaataagca

SEQ ID NO: 5367 - DNA, 485 bp, Unknown
  Ascusbbf_1340983, encodes 16S rRNA
agagtttgatcgggagcagaacgaacgagggcggcagggcttaggcaggaaagtcgaacggacgacagagtggcgggccattctgaagttaggggcgcacgagggaggaacgcgggggaaacggcccttcactggggaagaaaggcgggaaacggacgctaataccgcagacgcccgcaaggggaaagaggtatcggtgatggaggtgcccgcgttggattagctggttggtggggtaatggcctaccaaggcgatgatccatagctggtcggagaggacgatcagccacgctggaacggggccacggtccagactcctacgggaggccgccgctcagactcttgggcactggaggaacctctgcccccgccctgccgcgtgaatgaagacggccttcgggttgtaaagttcttttagtcatgaagatgatgaccgtcgtgacagaacacgccccggctaacttcgtgccagcagccgcggtaat

SEQ ID NO: 5368 - DNA, 490 bp, Unknown
  Ascusbbf_1324709, encodes 16S rRNA
agagtttgatcatggctcaggatgaacgctagctacaggcttaacacatgcaagtcgaggggcagcataacgaaagcttgcttttgttgatggcgaccggcgcacgggtgagtaacgcgtatccaaccttccccttagtagggcatagcccggcgaaagtcggattaataccctatgttatccgtcgaggacatcagaagtggattaaagatttatcgctaagggatggggatgcgtctgatgaggttgttggcggggtaacggcccaccgagccatcgatcagtaggggttctgagagtacggtcacgatcgtagggactgcgcgacggaccaaactcgtacgggaggaagcagtaaggaagattggtcaatgagcgagagcctgaaccaggcaagttgcgtgaagaatgacggcccgatgggtggtaaactgcttttgcatgggaataaagtgagggacgtggccctttttgtatgtaccatgagaat

SEQ ID NO: 5369 - DNA, 490 bp, Unknown
  Ascusbbf_915, encodes 16S rRNA
agagtttgatcctggctcaggatgaacgctagctacaggcttaacacatgcaagtcgaggggcagcatgaagtcagcttgctgactttgatggcgaccggcgcacgggtgcgtaacacgtatccaatctacccatggctcagggatagcctttcgaaagaaagattaatacctgatggtctgtgattgagacatctcgaacacagtaaagattaatcggcgatggatgaggatgcgtctgattagatagtaggcggggtaacggcccacctagtcgacgatcagtaggggttctgagaggaaggtcccccacattggaactgagacacggtccaaactcctacgggaggcagcagtgaggaatattggtcaatggacgagagtctgaaccagccaagtagcgtgaaggaagactgccctatgggttgtaaacttcttttgtttgggaataaagtgggccacgtgtggccttttgtatgtaccatacgaat

SEQ ID NO: 5370 - DNA, 490 bp, Unknown
  Ascusbbf_8941, encodes 16S rRNA
agagtttgatcctggctcaggatgaacgctagctacaggcttaacacatgcaagtcgaggggcagcatgggggttgcttgcaacttccgatggcgaccggcgcacgggtgagtaacgcgtatccaaccttccccatagtaggggatagcccgtagaaatgcggattaataccctatgttctccgaagaggacatctgatttggagtaaagatttatcgctatgggatggggatgcgtctgattaggctgcaggcggggtaacggcccacctggcctacgatcagtaggggttctgagaggaaggtcccccacactggtactgagacacggaccagactcctacgggaggcagcagtgaggaatattggtcaatgggcgtaagcctgaaccagccaagtagcgtgagggatgacggccctacgggttgtaaacctcttttgttcgggaataacgtgcggcacgcgtgccgctttgcatgtaccgttcgaat

SEQ ID NO: 5371 - DNA, 490 bp, Unknown
  Ascusbbf_8480, encodes 16S rRNA
agagtttgatcatggctcaggacgaacgctggcggcgtgcttaacacatgcaagtcgaacggagtgaaggggagcttgctccttggaacttagtggcaaacgggtgagtaacgcgtaggcaacctgcccttcagatggggacaacatttcgaaaggaatgctaataccgaatgacgtgcattggtcgcatgaccgatgcaccaaaggccgggcaaccggtcactgaaggatgggcctgcgtctgattagctagttggtggggtaacggcccaccaaggcgacgatcagtagccggtctgagaggatgaacggccacattgggactgagacacggcccaaactcctacgggaggcagcagtggggaatcttccgcaatgggcgcaagcctgacggagcaacgccgcgtgagtgaagaaggttttcggatcgtaaagctctgttgtcagggacgagagacttgatcaggaaatgggtcaaggaggacggtac

SEQ ID NO: 5372 - DNA, 490 bp, Unknown
  Ascusbbf_374, encodes 16S rRNA
agagtttgatcctggctcaggatgaacgctagctacaggcttaacacatgcaagtcgaggggcagcatagcggaagcttgcttctgctgatggcgaccggcgcacgggtgagtaacgcgtatccaaccttccctacagtaggggatagcccggcgaaagtcggattaataccctatgttcttcttcgatgacatctgaggagaagcaaaggttcaccgctataggatggggatgcgtctgattagcttgttggcggggtaacggcccaccaaggctacgatcagtaggggttctgagaggaaggtcccccacattggtactgagacacggaccaaactcctacgggaggcagcagtgaggaatattggtcaatgggcgagagcctgaaccagccaagtagcgtgcaggatgactgccctatgggttgtaaactgcttttatgcgggaataaagtcgggcacgtgtgcctgtttgtatgtaccgcatgaat

SEQ ID NO: 5373 - DNA, 490 bp, Unknown
  Ascusbbf_6906, encodes 16S rRNA
agagtttgatcatggctcaggatgaacgctagctacaggcttaacacatgcaagtcgaggggcagcgaagagttagcttgctaattctgtcggcgaccggcgcacgggtgagtaacgcgtatccaaccttccccttagtagggcatagcccggcgaaagtcggattaataccctatgttgttcatcgcaggcatctaaagtgaaccaaagatttattgctaagggatggggatgcgtctgattaggttgttggcggggtaacggcccaccaagccttcgatcagtaggggttctgagaggaaggtcccccacattggaactgagacacggtccaaactcctacgggaggcagcagtgaggaatattggtcaatggacggaagtctgaaccagccaagtagcgtgcaggatgacggccctatgggttgtaaactgcttttgtcagggaataaagttaggcacgtgtgcttatttgtatgtacctgaagaat

SEQ ID NO: 5374 - DNA, 490 bp, Unknown
  Ascusbbf_721, encodes 16S rRNA
agagtttgatcatggctcaggatgaacgctagctacaggcttaacacatgcaagtcgaggggcagcatgattctagcttgctagaattgatggcgaccggcgcacgggtgagtaacgcgtatccaaccttccctatagtagaggatagcccggcgaaagtcggattaatactctatgttgttcaatgcggacatctaagttgaaccaaaggtttaccgctataggatggggatgcgtctgattagatggtaggcggggtaacggcccacctagtcgacgatcagtaggggttctgagaggaaggtcccccacattggaactgagacacggtccaaactcctacgggaggcagcagtgaggaatattggtcaatgggcgagagcctgaaccagccaagtagcgtgcaggatgacggccctatgggttgtaaactgcttttatacggggataaagtgagggacgtgtccctttttgtaggtaccgtatgaat

SEQ ID NO: 5375 - DNA, 490 bp, Unknown
  Ascusbbf_3819, encodes 16S rRNA
agagtttgatcatggctcaggatgaacgctggcggcgtgcttaacacatgcaagtcgagcgaagctcctttgttgatttcttcggattgattcaaaggatgactgagcggcggacgggtgagtaacgcgtggagaacctgccccgtaccgggggataacagttagaaatgactgctaataccgcataagcgcacactatcgcatgatagagtgtgaaaaactccggtggtacgggatggctccgcgttggattagccagttggcggggtaacggcccaccaaagcgacgatccatagccggcctgagagggcgaccggccacattgggactgagacacggcccaaactcctacgggaggcagcagtggggaatattgcacaatgggggaaaccctgatgcagcgacgccgcgtgaacgaagaagtatttcggtatgtaaagttctatcagcagggaagaaaatgacggtacctgactaagaagccccggc

SEQ ID NO: 5376 - DNA, 490 bp, Unknown
  Ascusbbf_4323, encodes 16S rRNA
agagtttgatcatggctcaggatgaacgctagctacaggcttaacacatgcaagtcgaggggcagcatgagggtagcaatacctttgatggcgaccggcgcacgggtgcgtaacacgtatccaatctacccatggctcgggaatagcctttcgaaagaaagattaatgcccgatggtctgcgattgagacatctcgattacagtaaagatttatcggcgatggatgaggatgcgtccgattaggtagtaggcggggtaacggcccacctagccgacgatcggtaggggttctgagaggaaggtcccccacattggaactgagacacggtccaaactcctacgggaggcagcagtgaggaatattggtcaatgggcgcgagcctgaaccagccaagtagcgtgagggatgactgccctatgggttgtaaacctcttttgtttgggaataaagtgtcctacgagtaggattttgtatgtacctgacgaataa

SEQ ID NO: 5377 - DNA, 490 bp, Unknown
  Ascusbbf_6087, encodes 16S rRNA
agagtttgatcatggctcaggatgaacgctagctacaggcttaacacatgcaagtcgaggggcatcaggattctagcttgctagaattgctggcgaccggcgcacgggtgagtaacgcgtatccaacctggcccttagtagaggatagcccggcgaaagtcggattaatactctatgttctccaatgcgggcatctaatttggagcaaagatttatcgctatgggatggggatgcgtctgattagcttgtcggcggggtaacggcccaccgaggcaacgatcagtaggggttctgagaggaaggtcccccacattggtactgagacacggaccaaactcctacgggaggcagcagtgaggaatattggtcaatggacgcgagtctgaaccagccaagtagcgtgcaggatgactgccctatgggttgtaaactgcttttataggggaataaagtgaggcacgtgtgcctttttgtatgtaccctatgaat

SEQ ID NO: 5378 - DNA, 490 bp, Unknown
  Ascusbbf_8414, encodes 16S rRNA
agagtttgatcatggctcaggacgaacgctggcggcgtgcttaacacatgcaagtcgtgcgaggatgtgattggaaggtcttcggaccggaagattgcatccgagcggcggacgggtgagtaacgcgtgagcaacctgccttcaacagggggataacgcatcgaaagatgtgctaataccgcgtaagaccacggcatcacatggtgcaggggtcaaaggagcaatccggttgaagatgggctcgcgtccgattagccagttggtgaggtaacggcccaccaaagcaacgatcggtagccgacctgagagggtgatcggccacattggaactgagacacggtccagactcctacgggaggcagcagtggggaatattgggcaatgggcgaaagcctgacccagcaacgccgcgtgagggaagaagggtttcggctcgtaaacctctgtcctaaagggcgaagaaaatgacggtactttaggaggaagcccc

SEQ ID NO: 5379 - DNA, 300 bp, Unknown
  Ascusbbf_6176A, encodes 16S rRNA
agagtttgatcatggctcaggatgaacgctagctacaggcttaacacatgcaagtcgaggggcagcatgatcgaagcttgctttgattgatggcgaccggcgcacgggtgagtaacgcgtatccaaccttccctatagtagaggatagcccggcgaaagtcggattaatactctatgttttccaatgcagacatctaagttggaacaaaggttcaccgctataggatggggatgcgtctgattaggttgttggcggggtaacggcccaccaagcctacgatcagtaggggttctgagagg

SEQ ID NO: 5380 - DNA, 300 bp, Unknown
  Ascusbbf_6176B, encodes 16S rRNA
agagtttgatcatggctcaggatgaacgctagctacaggcttaacacatgcaagtcgaggggcagcatgacgatagcttgctattgttgatggcgaccggcgcacgggtgagtaacgcgtatccaaccttccctatagtagaggatagcccggcgaaagtcggattaatactctatgttttccaatgcagacatctaagttggaacaaaggtttaccgctataggatggggatgcgtctgattagatagtaggcggggtaacggcccacctagtcgacgatcagtaggggttctgagagg

SEQ ID NO: 5381 - DNA, 300 bp, Unknown
  Ascusbbf_6176C, encodes 16S rRNA
agagtttgatcatggctcaggatgaacgctagctacaggcttaacacatgcaagtcgaggggcagcatgatcgaagcttgctttgattgatggcgaccggcgcacgggtgagtaacgcgtatccaaccttccctatagtagaggatagcccggcgaaagtcggattaatactctatgttttccaatgcagacatctaagttggaacaaaggttcaccgctataggatggggatgcgtctgattaggtagtcggcggggtaacggcccaccgagccaacgatcagtaggggttctgagagg

SEQ ID NO: 5382 - DNA, 300 bp, Unknown
  Ascusbbf_6176D, encodes 16S rRNA
agagtttgatcatggctcaggatgaacgctagctacaggcttaacacatgcaagtcgaggggcagcatgatctaagcttgcttagattgatggcgaccggcgcacgggtgagtaacgcgtatccaaccttccctatagtagaggatagcccggcgaaagtcggattaatactctatgttttccaatgcagacatctaagttggaacaaaggttcaccgctataggatggggatgcgtctgattagatagtaggcggggtaacggcccacctagtcgacgatcagtaggggttctgagagg

SEQ ID NO: 5383 - DNA, 300 bp, Unknown
  Ascusbbf_6176E, encodes 16S rRNA
agagtttgatcatggctcaggatgaacgctagctacaggcttaacacatgcaagtcgaggggcagcatgatctaagcttgcttagattgatggcgaccggcgcacgggtgagtaacgcgtatccaaccttccctatagtagaggatagcccggcgaaagtcggattaatactctatgttttccaatgcagacatctaagttggaacaaaggttcaccgctataggatggggatgcgtctgattagattgtaggcggggtaacggcccacctagtcgacgatcagtaggggttctgagagg

SEQ ID NO: 5384 - DNA, 301 bp, Unknown
  Ascusbbf_6176F, encodes 16S rRNA
agagtttgatcatggctcaggatgaacgctagctacaggcttaacacatgcaagtcgaggggcagcatgatcgaagcttgctttgattgatggcgaccggcgcacgggtgagtaacgcgtatccaaccttccctatagtagaggatagcccggcgaaagtcggattaatactctatgttttccaatgcagacatctaagttggaacaaaggttcaccgctataggatggggatgcgtctgattaggtagtaggcgggttaacggcccacctagccgacgatcagtaggggttctgagagga

SEQ ID NO: 5385 - DNA, 300 bp, Unknown
  Ascusbbf_6176G, encodes 16S rRNA
agagtttgatcctggctcaggatgaacgctagctacaggcttaacacatgcaagtcgaggggcagcatgatctaagcttgcttagattgatggcgaccggcgcacgggtgagtaacgcgtatccaaccttccctatagtagaggatagcccggcgaaagtcggattaatactctatgttttccaatgcagacatctaagttggaacaaaggtttaccgctataggatggggatgcgtctgattagatagtaggcggggtaacggcccacctagtcgacgatcagtaggggttctgagagg

SEQ ID NO: 5386 - DNA, 300 bp, Unknown
  Ascusbbf_6176H, encodes 16S rRNA
agagtttgatcatggctcaggatgaacgctagctacaggcttaacacatgcaagtcgaggggcagcatgatctaagcttgcttagattgatggcgaccggcgcacgggtgagtaacgcgtatccaaccttccctatagtagaggatagcccggcgaaagtcggattaatactctatgttttccaatgcagacatctaaaatggaataaaggtttaccgctataggatggggatgcgtctgattagatagtaggcggggtaacggcccacctagtcgacgatcagtaggggttctgagagg

SEQ ID NO: 5387 - DNA, 300 bp, Unknown
  Ascusbbf_6176I, encodes 16S rRNA
agagtttgatcctggctcaggatgaacgctagctacaggcttaacacatgcaagtcgaggggcagcatgatcgaagcttgctttgattgatggcgaccggcgcacgggtgagtaacgcgtatccaaccttccctatagtagaggatagcccggcgaaagtcggattaatactctatgttttccaatgcagacatctaaaatggaacaaaggtttaccgctataggatggggatgcgtctgattagatagtaggcggggtaacggcccacctagtcgacgatcagtaggggttctgagagg

SEQ ID NO: 5388 - DNA, 301 bp, Unknown
  Ascusbbf_4883A, encodes 16S rRNA
agagtttgatcctggctcaggatgaacgctagctacaggcttaacacatgcaagtcgaggggcagcatattggtagcttgctaccaatgatggcgaccggcgcacgggtgagtaacgcgtatccaaccttccccatagtagggcatagcccgtagaaatgcggattaataccctatgttttccgaagatgacatctgatttggaacaaaggttcaccgctataggatggggatgcgtctgattagcttgttggcggggtaacggcccaccaaggcgacgatcagtaggggttctgagagga

SEQ ID NO: 5389 - DNA, 300 bp, Unknown
  Ascusbbf_4883B, encodes 16S rRNA
agagtttgatcctggctcaggatgaacgctagctacaggcttaacacatgcaagtcgaggggcagtatattggtagcttgctaccaatgatggcgaccggcgcacgggtgagtaacgcgtatccaaccttccccatagtagggcatagcccgtagaaatgcggattaataccctatgttttccgaagatgacatctgatttggaacaaaggttcaccgctatgggatggggatgcgtctgattaggtagtcggcggagtaacggcccaccgagccgacgatcagtaggggttctgagagg

SEQ ID NO: 5390 - DNA, 300 bp, Unknown
  Ascusbbf_4883C, encodes 16S rRNA
agagtttgatcctggctcaggatgaacgctagctacaggcttaacacatgcaagtcgaggggcagcatattggtagcttgctaccaatgatggcgaccggcgcacgggtgagtaacgcgtatccaaccttccccatagtagggcatagcccgtagaaatgcggattaataccctatgttttccgaagatgacatctgatttggaacaaaggttcaccgctatgggatggggatgcgtctgattaggtagtcggcggggtaacggcccaccgagccgacgatcagtaggggttctgagagg

SEQ ID NO: 5391 - DNA, 301 bp, Unknown
  Ascusbbf_4883D, encodes 16S rRNA
agagtttgatcctggctcaggatgaacgctagctacaggcttaacacatgcaagtcgaggggcagcatattggtagcttgctaccaatgatggcgaccggcgcacgggtgagtaacgcgtatccaaccttccccatagtagggcatagcccgtagaaatgcggattaataccctatgttttccgaagatgacatctgatttggaacaaaggttcaccgctatgggatggggatgcgtctgattaggtagtcggcggggtaacggcccaccgagccgacggtcagtaggggttctgagagga

SEQ ID NO: 5392 - DNA, 300 bp, Unknown
  Ascusbbf_4883E, encodes 16S rRNA
agagtttgatcatggctcaggatgaacgctagctacaggcttaacacatgcaagtcgaggggcagcatattggtagcttgctaccaatgatggcgaccggcgcacgggtgagtaacgcgtatccaaccttccccatagtagggcatagcccgtagaaatgcggattaataccctatgttttccgaagatgacatctgatttggaacaaaggttcaccgctatgggatggggatgcgtctgattaggtagtcggcggggtaacggcccaccgagccgacgatcagtaggggttctgagagg

SEQ ID NO: 5393 - DNA, 300 bp, Unknown
  Ascusbbf_13543A, encodes 16S rRNA
agagtttgatcatggctcaggacgaacgctggcggcgtgcttaacacatgcaagtcgaacggggcaattaaaagcttgcttttgaaagcctagtggcaaacgggtgagtaacgcgtaggcaacctacccttgggatggggacaacaggacgaaagccctgctaataccgaatgaagcatcccttccgcatggaggggatatgaaagatggcctctacttgtaagctatcacccagggatgggcctgcgtctgattagccagttggcggggtaacggcccaccaaagcgacgatcagtagc

SEQ ID NO: 5394 - DNA, 301 bp, Unknown
  Ascusbbf_13543B, encodes 16S rRNA
agagtttgatcctggctcaggacgaacgctggcggcgtgcttaacacatgcaagtcgaacgggattgattgaaagcttgcttttgagagatctagtggcaaacgggtgagtaacgcgtaggcaacctacccttgggatggggacaacaggacgaaagccctgctaataccgaatgaagcatcccttccgcatggaggggatatgaaagatggcctctacttgtaagctatcacccagggatgggcctgcgtctgattagccagttggcggggtaacggcccaccaaagcgacgatcagtag

SEQ ID NO: 5395 - DNA, 299 bp, Unknown
  Ascusbbf_13543C, encodes 16S rRNA
agagtttgatcatggctcaggacgaacgctggcggcgtgcttaacacatgcaagtcgaacggggcaatcgaaagcttgcttttgaaagcctagtggcaaacgggtgagtaacgcgtaggcaacctacccttgggatggggacaacaggacgaaagccctgctaataccgaatgaagcatcccttccgcatggaggggatatgaaagatggcctctacttgtaagctatcacccagggatgggcctgcgtctgattagccagttggcggggtaacggcccaccaaagcgacgatcagtag

SEQ ID NO: 5396 - DNA, 301 bp, Unknown
  Ascusbbf_13543D, encodes 16S rRNA
agagtttgatcctggctcaggatgaacgctggcggcgtgcctaatacatgcaagtcgagcgaaccacttcggtggtgagcggcgaacgggtgagtaacacgtaggtgatctgcccatcagacggggacaacgattggaaacgatcgctaataccggataggacgaaagtttaaaggtgcttctggcaccgctgatggatgagcctgcggcgcattagctagttggtagggtaaaggcctaccaaggcgacgatgcgtagccgacctgagagggtgaacggccacactgggactgagacacg

SEQ ID NO: 5397 - DNA, 299 bp, Unknown
  Ascusbbf_13543E, encodes 16S rRNA
agagtttgatcctggctcaggacgaacgctggcggcgtgcttaacacatgcaagtcgaacggggcaatcgaaagcttgcttttgaaagcctagtggcaaacgggtgagtaacgcgtaggcaacctacccttgggatggggacaacaggacgaaagccctgctaataccgaatgaagcatcccttccgcatggaggggatatgaaagatggcctctacttgtaagctatcacccagggatgggcctgcgtctgattagccagttggcggggtaacggcccaccaaagcgacgatcagtag

SEQ ID NO: 5398 - DNA, 300 bp, Unknown
  Ascusbbf_152A, encodes 16S rRNA
agagtttgatcctggctcaggacgaacgctggcggcgtgcttaacacatgcaagtcgaacgagaatccgtggaaagagttttcggacaatggaagcggaggaaagtggcggacgggtgagcaacgcgtgaggaacctgccttggagagggggacaacagctggaaacggctgctaataccgcatgatgcattggagtcgcatggctctgatgccaaagatttatcgctctgagatggcctcgcgtctgattagatagttggcggggtaacggcccaccaagtcgacgatcagtagccgga

SEQ ID NO: 5399 - DNA, 300 bp, Unknown
  Ascusbbf_152B, encodes 16S rRNA
agagtttgatcatggctcaggacgaacgctggcggcgtgcttaacacatgcaagtcgaacgagaatccgtggaaagagttttcggacaatggaagcggaggaaagtggcggacgggtgagtaacgcgtgaggaacctgccttggagagggggacaacagctggaaacggctgctaataccgcatgatgcattggagtcgcatggctctgatgccaaagatttatcgctctgagatggcctcgcgtctgattagatagttggcggggtaacggcccaccaagtcgacgatcagtagccgga

SEQ ID NO: 5400 - DNA, 300 bp, Unknown
  Ascusbbf_152C, encodes 16S rRNA
agagtttgatcctggctcaggacgaacgctggcggcgtgcttaacacatgcaagtcgaacgagaatccgtggaaagagttttcggacaatggaagcggaggaaagtggcggacgggtgagtaacgcgtgaggaacctgccttggagagggggacaacagctggaaacggctgctaataccgcatgatgcattggagtcgcatggctctgatgccaaagatttatcgctctgagatggcctcgcgtctgattagatagttggcggggtaacggcccaccaagtcgacgatcagtagccgga

SEQ ID NO: 5401 - DNA, 300 bp, Unknown
  Ascusbbf_707A, encodes 16S rRNA
agagtttgatcctggctcaggatgaacgctagctacaggcttaacacatgcaagtcgaggggcagcgagaggaaagcttgctttccttgtcggcgaccggcgcacgggtgagtaacgcgtatccaaccttccccttagtagggcatagcccggcgaaagtcggattaataccctatgttttccgatgaggacatctgagctggaacaaagatttatcgctaagggatggggatgcgtctgattaggtagtcggcggggtaacggcccaccgagcctacgatcagtaggggttctgagagg

SEQ ID NO: 5402 - DNA, 300 bp, Unknown
  Ascusbbf_707B, encodes 16S rRNA
agagtttgatcatggctcaggatgaacgctagctacaggcttaacacatgcaagtcgaggggcagcgagaggaaagcttgctttccttgtcggcgaccggcgcacgggtgagtaacgcgtatccaaccttccccttagtagggcatagcccggcgaaagtcggattaataccctatgttttccgatgaggacatctgagctggaacaaagatttatcgctaagggatggggatgcgtctgattaggtagtcggcggggtaacggcccaccgagcctacgatcagtaggggttctgagagg

SEQ ID NO: 5403 - DNA, 301 bp, Unknown
  Ascusbbf_707C, encodes 16S rRNA
agagtttgatcatggctcaggatgaacgctagctacaggcttaacacatgcaagtcgaggggcagcgagagggaagcttgctttccttgtcggcgaccggcgcacgggtgagtaacgcgtatccaaccttccccttagtagggcatagcccggcgaaagtcggattaataccctatgttttccgatgaggacatctgagctggaacaaagatttatcgctaagggatggggatgcgtctgattaggttgttggcggggtaacggcccaccaagcctgcgatcagtaggggttctgagagga

SEQ ID NO: 5404 - DNA, 300 bp, Unknown
  Ascusbbf_707D, encodes 16S rRNA
agagtttgatcctggctcaggatgaacgctagctacaggcttaacacatgcaagtcgaggggcagcgagaagaaagcttgctttctttgtcggcgaccggcgcacgggtgagtaacgcgtatccaaccttccccttagtagggcatagcccggcgaaagtcggattaataccctatgttttccaatgaggacatctgagctggaacaaagatttatcgctaagggatggggatgcgtctgattaggtagtcggcggggtaacggcccaccgagcctgcgatcagtaggggttctgagagg

SEQ ID NO: 5405 - DNA, 300 bp, Unknown
  Ascusbbf_707E, encodes 16S rRNA
agagtttgatcctggctcaggatgaacgctagctacaggcttaacacatgcaagtcgaggggcatcgagaagaaagcttgctttctttgtcggcgaccggcgcacgggtgagtaacgcgtatccaaccttccccttagtagggcatagcccggcgaaagtcggattaataccctatgttttccgttgaggacatctgaagtggaacaaagattcatcgctaagggatggggatgcgtctgattaggtagtcggcggggtaacggcccaccgagccaacgatcagtaggggttctgagagg

SEQ ID NO: 5406 - DNA, 300 bp, Unknown
  Ascusbbf_707F, encodes 16S rRNA
agagtttgatcctggctcaggatgaacgctagctacaggcttaacacatgcaagtcgaggggcatcgagaggaaagcttgctttccttgtcggcgaccggcgcacgggtgagtaacgcgtatccaaccttccccttagtagggcatagcccggcgaaagtcggattaataccctatgttttccgatgaggacatctgagctggaacaaagatttatcgctaagggatggggatgcgtctgattaggttgttggcggggtaacggcccaccaagcctacgatcagtaggggttctgagagg

SEQ ID NO: 5407 - DNA, 300 bp, Unknown
  Ascusbbf_707G, encodes 16S rRNA
agagtttgatcctggctcaggatgaacgctagctacaggcttaacacatgcaagtcgaggggcatcgagaggaaagcttgctttccttgtcggcgaccggcgcacgggtgagtaacgcgtatccaaccttccccttagtagggcatagcccggcgaaagtcggattaataccctatgttttccgatgaggacatctgagctggaataaagatttatcgctaagggatggggatgcgtctgattaggtagtcggcggggtaacggcccaccgagccaacgatcagtaggggttctgagagg

SEQ ID NO: 5408 - DNA, 300 bp, Unknown
  Ascusbbf_707H, encodes 16S rRNA
agagtttgatcatggctcaggatgaacgctagctacaggcttaacacatgcaagtcgaggggcatcgagaggaaagcttgctttccttgtcggcgaccggcgcacgggtgagtaacgcgtatccaaccttccccttagtagggcatagcccggcgaaagtcggattaataccctatgttttccgatgaggacatctgagctggaacaaagatttatcgctaagggatggggatgcgtctgattaggttgttggcggggtaacggcccaccaagcctacgatcagtaggggttctgagagg

SEQ ID NO: 5409 - DNA, 300 bp, Unknown
  Ascusbbf_707I, encodes 16S rRNA
agagtttgatcctggctcaggatgaacgctagctacaggcttaacacatgcaagtcgaggggcagcgagaggaaagcttgctttccttgtcggcgaccggcgcacgggtgagtaacgcgtatccaacctggcccttagtaggggatagcccggcgaaagtcggattaataccctatgttttcctatgaggacatctgagcaggaacaaagatttatcgctaagggatggggatgcgtctgattagcttgtcggcggggtaacggcccaccgaggctacgatcagtaggggttctgagagg

SEQ ID NO: 5410 - DNA, 300 bp, Unknown
  Ascusbbf_707J, encodes 16S rRNA
agagtttgatcctggctcaggatgaacgctagctacaggcttaacacatgcaagtcgaggggcagcgagaggaaagcttgctttccttgtcggcgaccggcgcacgggtgagtaacgcgtatccaaccttccccttagtagggcatagcccggcgaaagtcggattaataccctatgttttccaatgaggacatctgagctggaacaaagatttatcgctaagggatggggatgcgtctgattaggtagtcggcggggtaacggcccaccgagcctacgatcagtaggggttctgagagg

SEQ ID NO: 5411 - DNA, 301 bp, Unknown
  Ascusbbf_1238A, encodes 16S rRNA
agagtttgatcctggctcagaacgaacgctggtggagtgtcttatacatgcaagtcgagcgaggacgtagcaatacgagccgagcggcgaatgggtgagtaacgcgtaagcaatctgccccgcattccggaacaaccgtgccaacgcgcggctaatgccgggagccgtggcggtccacatgggccgttgacgaaagatttatcgatgcgggatgagcttgcgtccgattagctagttggcggggcaacggcccaccaaggcgacgatcggtagccggcctgagagggcgatcggccacatt

SEQ ID NO: 5412 - DNA, 301 bp, Unknown
  Ascusbbf_1238B, encodes 16S rRNA
agagtttgatcctggctcagaacgaacgctggtggagtgtcttatacatgcaagtcgagcgaggacgtagcaatacgagccgagcggcgaatgggtgagtaacgcgtaagcaatctgccctgcattccggaacaaccgtgccaacgcgcggctaatgccgggagtcgtggtagtccacatggacgattgacgaaagatttatcgatgcaggatgagcttgcgtccgattagctagttggcggggtaacggcccaccaaggcgacgatcggtagccggcctgagagggcgatcggccacatt

SEQ ID NO: 5413 - DNA, 301 bp, Unknown
  Ascusbbf_1238C, encodes 16S rRNA
agagtttgatcatggctcaggacgaacgctggcggcgtgcttaacacatgcaagtcgaacgagacgatttagaagcttgcttttattgagtcgagtggcaaacgggtgagtaacgcgtagacaacctgccgcaaagatggggacaacagtccgaaaggactgctaataccgaatgttgtatctcctccgcatgaaagagatattaaagatggcctctacttgtaagctatcgctttgcgatgggtctgcgtctgattagctagttggtggggcaacggcctaccaaggcaacgatcagtag

SEQ ID NO: 5414 - DNA, 301 bp, Unknown
  Ascusbbf_1238D, encodes 16S rRNA
agagtttgatcctggctcagaacgaacgctggtggagtgtcttatacatgcaagtcgagcgaggacgtagcaatacgagccgagcggcgaatgggtgagtaacgcgtaagcaatctgccccgcattccggaacagccgtgccaacgcgcggctaatgccgggagccgtggcggtccgcatgggccgttgacgaaagatttatcgatgcgggatgagcttgcgtccgattagctagttggcggggcaacggcccaccaaggcgacgatcggtagccggcctgagagggcgatcggccacatt

SEQ ID NO: 5415 - DNA, 301 bp, Unknown
  Ascusbbf_5588A, encodes 16S rRNA
agagtttgatcctggctcaggatgaacgctagctacaggcttaacacatgcaagtcgaggggcagcatgacgagtgcttgcacttgttgatggcgaccggcgcacgggtgcgtaacgcgtatcgaaccttccccttactcgggaatagcccggtgaaaaccgaattaatgcccgatatatatttagatggcatcagaagagtatgaaagatttatcggtaagggatggcgatgcgtaggattaggtagtcggcggggtaacggcccaccgagcccacgatccttaggggttctgagaggaa

SEQ ID NO: 5416 - DNA, 300 bp, Unknown
  Ascusbbf_5588B, encodes 16S rRNA
agagtttgatcctggctcaggatgaacgctagctacaggcttaacacatgcaagtcgaggggcagcatgacgatagcttgctattgttgatggcgaccggcgcacgggtgcgtaacgcgtatcgaaccttccccttactcgggaatagcccggtgaaaaccgaattaatgcccgatatatatttagatggcatcagaagagtatgaaagatttatcggtaagggatggcgatgcgtaggattaggtagtcggcggggtaacggcccaccgagcctacgatccttaggggttctgagagga

SEQ ID NO: 5417 - DNA, 300 bp, Unknown
  Ascusbbf_5588C, encodes 16S rRNA
agagtttgatcatggctcaggatgaacgctagctacaggcttaacacatgcaagtcgaggggcagcatgacgagtgcttgcacttgttgatggcgaccggcgcacgggtgcgtaacgcgtatcgaaccttccccttactcgggaatagcccggtgaaaaccgaattaatgcccgatatatatttagatggcatcagaagagtatgaaagatttatcggtaagggatggcgatgcgtaggattaggtagtcggcggggtaacggcccaccgagcctacgatccttaggggttctgagagga

SEQ ID NO: 5418 - DNA, 301 bp, Unknown
  Ascusbbf_5588D, encodes 16S rRNA
agagtttgatcctggctcaggatgaacgctagctacaggcttaacacatgcaagtcgaggggcagcatgacgagtgcttgcacttgttgatggcgaccggcgcacgggtgcgtaacgcgtatcgaaccttccccttactcgggaatagcccggtgaaaaccgaattaatgcccgatatatatttagatggcatcagaagagtatgaaagatttatcggtaagggatggcgatgcgtaggattaggtagtcggcggggtaacggcccaccgagcctacgatccttaggggttctgagaggaa

SEQ ID NO: 5419 - DNA, 301 bp, Unknown
  Ascusbbf_5588E, encodes 16S rRNA
agatttgatcctggctcaggatgaacgctagctacaggcttaacacatgcaagtcgaggggcagcatgacgatagcttgctattgttgatggcgaccggcgcacgggtgcgtaacgcgtatcgaaccttccccttactcgggaatagcccggtgaaaaccgaattaatgcccgatatatatttagatggcatcagaagagtatgaaagatttatcggtaagggatggcgatgcgtaggattaggtagtcggcggggtaacggcccaccgagcctacgatccttaggggttctgagaggaag

SEQ ID NO: 5420 - DNA, 300 bp, Unknown
  Ascusbbf_5588F, encodes 16S rRNA
agagtttgatcatggctcaggacggacgctagctacaggattaacacatgcaagtcgaggggcagcatgacgagtgcttgcacttgttgatggcgaccggcgcacgggtgcgtaacgcgtatcgaaccttccccttactcgggaatagcccggtgaaaaccgaattaatgcccgatatatatttagatggcatcagaagagtatgaaagatttatcggtaagggatggcgatgcgtaggattaggtagtcggcggggtaacggcccaccgagcccacgatccttaggggttctgagagga

SEQ ID NO: 5421 - DNA, 300 bp, Unknown
  Ascusbbf_5588G, encodes 16S rRNA
agagtttgatcatggctcaggatgaacgctagctacaggcttaacacatgcaagtcgaggggcagcatgacgatagcttgctattgttgatggcgaccggcgcacgggtgcgtaacgcgtatcgaaccttccccttactcgggaatagcccggtgaaaaccgaattaatgcccgatatatatttagatggcatcagaagagtatgaaagatttatcggtaagggatggcgatgcgtaggattaggtagtcggcggggtaacggcccaccgagcctacgatccttaggggttctgagagga

SEQ ID NO: 5422 - DNA, 300 bp, Unknown
  Ascusbbf_5588H, encodes 16S rRNA
agagtttgatcatggctcaggatgaacgctagctacaggcttaacacatgcaagtcgaggggcagcatgacgggtgcttgcacttgttgatggcgaccggcgcacgggtgcgtaacgcgtatcgaaccttccccttactcgggaatagcccggtgaaaaccgaattaatgcccgatatatatttagatggcatcagaagagtatgaaagatttatcggtaagggatggcgatgcgtaggattaggtagtcggcggggtaacggcccaccgagccgacgatccttaggggttctgagagga

SEQ ID NO: 5423 - DNA, 301 bp, Unknown
  Ascusbbf_4691A, encodes 16S rRNA
agagtttgatcatggctcaggatgaacgctggcggcgtgcctaacacatgcaagtcgaacgaagcactttcctcggagattcgtcgaagagggatttgacttagtggcggacgggtgagtaatgtatgagcaacctgcctttcagagggggacaacagttggaaacgactgctaataccgcataatgtatcgagggggcatccctttgataccaaaggagcaatccgctgaaagatgggctcatatctgattagttagttggtggggtaacggctcaccaagactgcgatcagtagccggg

SEQ ID NO: 5424 - DNA, 301 bp, Unknown
  Ascusbbf_4691B, encodes 16S rRNA
agagtttgatcctggctcaggatgaacgctggcggcgtgcctaacacatgcaagtcgaacgaagcactttcctcggagattcgtcgaagagggatttgacttagtggcggacgggtgagtaatgtatgagcaacctgcctttcagagggggacaacagttggaaacgactgctaataccgcataatgtatcgagggggcatccctttgataccaaaggagcaatccgctgaaagatgggctcatatctgattagttagttggtggggtaacggctcaccaagactgcgatcagtagccggg

SEQ ID NO: 5425 - DNA, 301 bp, Unknown
  Ascusbbf_4691C, encodes 16S rRNA
agagtttgatcatggctcaggatgaacgctggcggcgtgcctaacacatgcaagtcgaacgaagcatcttcctcagagattcgtcgaagagggatttgacttagtggcggacgggtgagtaatgtatgagcaacctgcctttcagagggggacaacagttggaaacgactgctaataccgcataatgtatcgagggggcatccttttgataccaaaggagcaatccgctgaaagatgggctcatatctgattagttagttggtagggtaacggcctaccaagactgcgatcagtagccggg

SEQ ID NO: 5426 - DNA, 301 bp, Unknown
  Ascusbbf_9770A, encodes 16S rRNA
agagtttgatcctggctcaggatgaacgctggcggcgtgcctaatacatgcaagtcgagcgaggtagcttgctacctagcggcgaacgggtgagtaacacgtaggtaacctgcctttaagactgggatacccaggcgaaagcttggctaataccggataacaacggggatcgcatgatctccgcttgaaaggtgcgtttgcaccacttttagatggacctgcggcacattagctagttggtgagataacagcccaccaaggcgaggatgtgtagccgacctgagagggtgaccggccacaa

SEQ ID NO: 5427 - DNA, 301 bp, Unknown
  Ascusbbf_9770B, encodes 16S rRNA
agagtttgatcatggctcaggatgaacgctggcggcgtgcctaatacatgcaagtcgagcgaggtagcttgctacctagcggcgaacgggtgagtaacacgtaggtaacctgcctttaagactgggatacccaggcgaaagcttggctaataccggataacaacggggatcgcatgatctccgcttgaaaggtgcgtttgcaccacttttagatggacctgcggcacattagctagttggtgagataacagcccaccaaggcgaggatgtgtagccgacctgagagggtgaccggccacaa

SEQ ID NO: 5428 - DNA, 301 bp, Unknown
  Ascusbbf_9770C, encodes 16S rRNA
agagtttgatcatggctcaggatgaacgctggcggcgtgcctaatacatgcaagtcgagcgaggtagcttgctacctagcggcgaacgggtgagtaacacgtaggtaacctgcctttgagactgggatacccgagggaaacttcggctaataccggataacaacggggatggcatcatctccgcttgaaaggtgcgtttgcaccactcttagatggacctgcggcacattagctagttggtgagataatagcccaccaaggcgaggatgtgtagccgacctgagagggtaaacggccacaa

SEQ ID NO: 5429 - DNA, 301 bp, Unknown
  Ascusbbf_9770D, encodes 16S rRNA
agagtttgatcatggctcaggatgaacgctggcggcgtgcctaatacatgcaagtcgagcgaggtagcttgctacctagcggcgaacgggtgagtaacacgtaggtaacctgcctttgagactgggatacccgagggaaacttcggctaataccggataacaacggggatggcatcatctccgcttgaaaggtgcgtttgcaccactcttagatggacctgcggcacattagctagttggtgagataacagcccaccaaggcgaggatgtgtagccgacctgagagggtaaacggccacaa

SEQ ID NO: 5430 - DNA, 301 bp, Unknown
  Ascusbbf_9770E, encodes 16S rRNA
agagtttgatcctggctcaggatgaacgctggcggcgtgcctaatacatgcaagtcgagcgaggtagcttgctacctagcggcgaacgggtgagtaacacgtaggtaacctgcctttaagactgggatacccgagggaaacttcggctaataccggataacaacggggatggcatcatctccgcttgaaaggtgcgtttgcaccacttttagatggacctgcggcacattagctagttggtgagataacagcccaccaaggcgaggatgtgtagccgacctgagagggtgaccggccacaa

SEQ ID NO: 5431 - DNA, 301 bp, Unknown
  Ascusbbf_9770F, encodes 16S rRNA
agagtttgatcctggctcaggatgaacgctggcggcgtgcctaatacatgcaagtcgagcgaggtagcttgctacctagcggcgaacgggtgagtaacacgtaggtaacctgcctttgagactgggatacccgagggaaacttcggctaataccggataacaacggggatggcatcatctccgcttgaaaggtgcgtttgcaccactcttagatggacctgcggcacattagctagttggtgagataatagcccaccaaggcgaggatgtgtagccgacctgagagggtaaacggccacaa

SEQ ID NO: 5432 - DNA, 301 bp, Unknown
  Ascusbbf_9770G, encodes 16S rRNA
agagtttgatcatggctcaggatgaacgctggcggcgtgcctaatacatgcaagtcgagcgaggtagcttgctacctagcggcgaacgggtgagtaacacgtaggtaacctgcctttaagactgggatacccgagggaaacttcggctaataccggataacaacggggatggcatcatctccgcttgaaaggtgcgtttgcaccacttttagatggacctgcggcacattagctagttggtgagataacagcccaccaaggcgaggatgtgtagccgacctgagagggtgaccggccacaa

SEQ ID NO: 5433 - DNA, 301 bp, Unknown
  Ascusbbf_9770H, encodes 16S rRNA
agagtttgatcctggctcaggatgaacgctggcggcgtgcctaatacatgcaagtcgagcgaggtagcttgctacctagcggcgaacgggtgagtaacacgtaggtaacctgcctttgagactgggatacccgaaggaaacttcggctaataccggataacaacggggatggcatcatctccgcttgaaaggtgcgtttgcaccactcttagatggacctgcggcacattagctagttggtgagataatagcccaccaaggcgaggatgtgtagccgacctgagagggtaaacggccacaa

SEQ ID NO: 5434 - DNA, 301 bp, Unknown
  Ascusbbf_14146A, encodes 16S rRNA
agagtttgatcctggctcaggatgaacgctagctacaggcttaacacatgcaagtcgaggggcagcattttagtttgcttgcaaactaaagatggcgaccggcgcacgggtgagtaacacgtatccaacctgccgataactcggggatagcctttcgaaagaaagattaatatccgatagtatattaaaaccgcatggttttactattaaagaatttcggttatcgatggggatgcgttccattagtttgttggcggggtaacggcccaccaagactacgatggataggggttctgagagg

SEQ ID NO: 5435 - DNA, 301 bp, Unknown
  Ascusbbf_14146B, encodes 16S rRNA
agagtttgatcatggctcaggatgaacgctagctacaggcttaacacatgcaagtcgaggggcagcattttagtttgcttgcaaactaaagatggcgaccggcgcacgggtgagtaacacgtatccaacctgccgataactcggggatagcctttcgaaagaaagattaatatccgatagtatattaaaaccgcatggttttactattaaagaatttcggttatcgatggggatgcgttccattagtttgttggcggggtaacggcccaccaagactacgatggataggggttctgagagg

SEQ ID NO: 5436 - DNA, 301 bp, Unknown
  Ascusbbf_14146C, encodes 16S rRNA
agagtttgatcctggctcagattgaacgctggcggcaggcctaacacatgcaagtcgaggggcagcattttagtttgcttgcaaactaaagatggcgaccggcgcacgggtgagtaatacgtatccaacctgccgataactcggggatagcctttcgaaagaaagattaatatccgatagtatattaaaaccgcatggttttactattaaagaatttcggttatcgatggggatgcgttccattagtttgttggcggggtaacggcccaccaagactacgatggataggggttctgagagg

SEQ ID NO: 5437 - DNA, 301 bp, Unknown
  Ascusbbf_14146D, encodes 16S rRNA
agagtttgatcatggctcaggatgaacgctagctacaggcttaacacatgcaagtcgaggggcagcattttagtttgcttgcaaactaaagatggcgaccggcgcacgggtgagtaacacgtatccaacctgccgataactcggggatagcctttcgaaagaaagattaatatccgatggtatattaaaaccgcatggttttactattaaagaatttcggttatcgatggggatgcgttccattagtttgttggcggggtaacggcccaccaagactacgatggataggggttctgagagg

SEQ ID NO: 5438 - DNA, 301 bp, Unknown
  Ascusbbf_14146E, encodes 16S rRNA
agagtttgatcatggctcagtttgaacgctggcggcaggcctaacacatgcaagtcgaggggcagcattttagtttgcttgcaaactaaagatggcgaccggcgcacgggtgagtaacacgtatccaacctgccgataactcggggatagcctttcgaaagaaagattaatatccgatggtatattaaaaccgcatggttttactattaaagaatttcggttatcgatggggatgcgttccattagtttgttggcggggtaacggcccaccaagactacgatggataggggttctgagagg

SEQ ID NO: 5439 - DNA, 301 bp, Unknown
  Ascusbbf_14146F, encodes 16S rRNA
agagtttgatcatggctcaggatgaacgctgacagaatgctttacacatgcaagtcgaggggcagcattttagtttgcttgcaaactaaagatggcgaccggcgcacgggtgagtaacacgtatccaacctgccgataactcggggatagcctttcgaaagaaagattaatatccgatagtatattaaaaccgcatggttttactattaaagaatttcggttatcgatggggatgcgttccattagtttgttggcggggtaacggcccaccaagacaacgatggataggggttctgagagg

SEQ ID NO: 5440 - DNA, 301 bp, Unknown
  Ascusbbf_14146G, encodes 16S rRNA
agagtttgatcatggctcaggatgaacgctagctataggcttaacacatgcaagtcgaggggcagcattttagtttgcttgcaaactaaagatggcgaccggcgcacgggtgagtaacacgtatccaacctgccgataactcggggatagcctttcgaaagaaagattaatatccgatggtatattaaaaccgcatggttttactattaaagaatttcggttatcgatggggatgcgttccattagtttgttggcggggtaacggcccaccaagactacgatggataggggttctgagagg

SEQ ID NO: 5441 - DNA, 300 bp, Unknown
  Ascusbbf_1103A, encodes 16S rRNA
agagtttgatcatggctcaggatgaacgctggcggcgtgcttaacacatgcaagtcgaacggagtattgagaatgaagttttcggatggatttttcaatacttagtggcggacgggtgagtaacgcgtgggtaacctgcctcacacagggggataacagttggaaacgactgttaataccgcataagaccacagtaccgcatggtacaggggtaaaaactccggtggtgtgagatggacccgcgtctgattagttagttggcggggtaacggcccaccaagacgacgatcagtagccgat

SEQ ID NO: 5442 - DNA, 298 bp, Unknown
  Ascusbbf_1103B, encodes 16S rRNA
agagtttgatcctggctcaggatgaacgctggcggcgtgcttaacacatgcaagtcgaacggagtactgagaatgaagttttcggatggatttttcagtacttagtggcggacgggtgagtaacgcgtgggtaacctgcctcacacagggggataacagttggaaacgactgttaataccgcataagaccacagtaccgcatggtacaggggtaaaaactccggtggtgtgagatggacccgcgtctgattagttagttggcggggtaacggcccaccaagacgacgatcagtagccg

SEQ ID NO: 5443 - DNA, 300 bp, Unknown
  Ascusbbf_1103C, encodes 16S rRNA
agagtttgatcatggctcaggatgaacgctagctacaggcttaacacatgcaagtcgaggggcagcatgatcttagcttgctaagattgatggcgaccggcgcacgggtgagtaacgcgtatccaaccttccctgtactaggggatagcccggcgaaagtcggattaataccctatgttttccgaagcgagcatttaatttggaacaaaggtttaccggtataggatggggatgcgtctgattagatagtaggcggggtaacggcccacctagtcgacgatcagtaggggttctgagagg

SEQ ID NO: 5444 - DNA, 298 bp, Unknown
  Ascusbbf_1103D, encodes 16S rRNA
agagtttgatcatggctcaggatgaacgctggcggcgtgcttaacacatgcaagtcgaacggagtactgagaatgaagttttcggatggatttttcaatacttagtggcggacgggtgagtaacgcgtgggtaacctgcctcacacagggggataacagttggaaacgactgttaataccgcataagaccacagtaccgcatggtacaggggtaaaaactccggtggtgtgagatggacccgcgtctgattagttagttggcggggtaacggcccaccaagacgacgatcagtagccg

SEQ ID NO: 5445 - DNA, 300 bp, Unknown
  Ascusbbf_1103E, encodes 16S rRNA
agagtttgatcctggctcaggatgaacgctggcggcgtgcttaacacatgcaagtcgaacggagtattgagaatgaagttttcggatggattttttaatacttagtggcggacgggtgagtaacgcgtgggtaacctgcctcacacagggggataacagttggaaacgactgttaataccgcataagaccacagtaccgcatggtacaggggtaaaaactccggtggtgtgagatggacccgcgtctgattagttagttggcggggtaacggcccaccaagacgacgatcagtagccgat

SEQ ID NO: 5446 - DNA, 300 bp, Unknown
  Ascusbbf_1103F, encodes 16S rRNA
agagtttgatcctggctcaggatgaacgctggcggcgtgcttaacacatgcaagtcgaacggagtaataagaatgaagttttcggatggattttttattacttagtggcggacgggtgagtaacgcgtgggtaacctgcctcatacagggggataacagttggaaacgactgttaataccgcataagaccacagtgccgcatggcacaggggtaaaaactccggtggtatgagatggacccgcgtctgattagttagttggcggggtaacggcccaccaagacgacgatcagtagccgat

SEQ ID NO: 5447 - DNA, 300 bp, Unknown
  Ascusbbf_1103G, encodes 16S rRNA
agagtttgatcatggctcaggatgaacgctggcggcgtgcttaacacatgcaagtcgaacggagtattagagatgaagttttcggatggattttttaatacttagtggcggacgggtgagtaacgcgtgggtaacctgcctcatacagggggataacagttggaaacgactgttaataccgcataagaccacagtaccgcatggtacaggggtaaaaactccggtggtatgagatggacccgcgtctgattagttagttggcggggtaacggcccaccaagacgacgatcagtagccgat

SEQ ID NO: 5448 - DNA, 301 bp, Unknown
  Ascusbbf_1103H, encodes 16S rRNA
agagtttgatcatggctcaggatgaacgctagcggcaggcttaacacatgcaagtcgaggggtaacaggggatgtagcaatacatcctgctgacgaccggcgcacgggtgcgtaacgcgtatgcaacctgcccgcaacaggggtataacggagtgaaaattccactaatcccccatattgtcattaggccgcatggctttatgacgaaaggttattctggttgcggatgggcatgcgtgacattaggtagttggcggggtaacggcccaccaagccgacgatgtctaggggagctgagagg

SEQ ID NO: 5449 - DNA, 300 bp, Unknown
  Ascusbbf_1103I, encodes 16S rRNA
agagtttgatcatggctcaggatgaacgctggcggcgtgcttaacacatgcaagtcgaacggagtatcaagaatgaagttttcggatggattttttgatacttagtggcggacgggtgagtaacgcgtgggtaacctgcctcatacagggggataacagttggaaacgactgttaataccgcataagaccacagtaccgcatggtacaggggtaaaaactccggtggtatgagatggacccgcgtctgattagttagttggcggggtaacggcccaccaagacgacgatcagtagccgat

SEQ ID NO: 5450 - DNA, 300 bp, Unknown
  Ascusbbf_13717A, encodes 16S rRNA
agagtttgatcatggctcaggatgaacgctagctacaggcttaacacatgcaagtcgaggggcagcatggaggttgcttgcaacttccgatggcgaccggcgcacgggtgagtaacacgtatccaaccttccccgcggtggggaacagcccgctgaaaggcggattaatgccccatggtctcctttgcaggcatctaacgaggagtaaagattgatcgccgcgggatggggatgcgcccgattaggcagcaggcggggtgacggcccacctggccatcgatcggtaggggttctgagagg

SEQ ID NO: 5451 - DNA, 298 bp, Unknown
  Ascusbbf_13717B, encodes 16S rRNA
agagtttgatcatggctcaggacgaacgctggcggcgtgcctaacacatgcaagtcgaacggggattttgtttcggcagaatcctagtggcgaacgggtgagtaacgcgtaggcaacctgccctccggccggggacaacactccgaaaggggtgctaataccggatacgaagtctgtgccgcatggtacggatttgaaagatggcctctgtttacaagctatcgccgggggatgggcctgcgtccgattagctggttggtggggtaacggcctaccaaggcgacgatcggtagccggt

SEQ ID NO: 5452 - DNA, 300 bp, Unknown
  Ascusbbf_13717C, encodes 16S rRNA
agagtttgatcatggctcaggatgaacgctagctacaggcttaacacatgcaagtcgaggggcagcatggaggttgcttgcaacttccgatggcgaccggcgcacgggtgagtaacacgtatccaaccttccccgcggtagggaacagcccgctgaaaggcggattaatgccctatggtctcctttgcaggcatctaatgaggagtaaagattgatcgccgcgggatggggatgcgcccgattaggcagcaggcggggtgacggcccacctggccatcgatcggtaggggttctgagagg

SEQ ID NO: 5453 - DNA, 300 bp, Unknown
  Ascusbbf_876A, encodes 16S rRNA
agagtttgatcatggctcaggatgaacgctggcggcgtgcctaacacatgcaagtcgagcggagtgaagagagcttgcttttttcactcagcggcggatgggtgaggaacgcgtggggaacctgcctctcacagggggataacagctggaaacggctgttaataccgcatatgcacacagtgccgcatggcacagggtggaaagaaattcggtgagagatggacccgcgttggattagcttgttggcggggtaacggcccaccaaggcgatgatccatagccggcctgagagggcgaccg

SEQ ID NO: 5454 - DNA, 301 bp, Unknown
  Ascusbbf_876B, encodes 16S rRNA
agagtttgatcatggctcaggatgaacgctggcggcgtgcctaacacatgcaagtcgagcggagtgaagagagcttgcttttttcactcagcggcggatgggtgaggaacgcgtggggaacctacctctcacagggggataacagctggaaacggctgttaataccgcatatgcacacagtgccgcatggcacagggtggaaagaaattcggtgagagatggacccgcgttggattagcttgttggcggggtaacggcccaccaaggcgatgatccatagccggcctgagagggcgaccgg

SEQ ID NO: 5455 - DNA, 301 bp, Unknown
  Ascusbbf_876C, encodes 16S rRNA
agagtttgatcctggctcaggatgaacgctggcggcgtgcctaacacatgcaagtcgagcggagtgaagagagcttgcttttttcacttagcggcggatgggtgaggaacgcgtggggaacctgcctctcacagggggataacagctggaaacggctgttaataccgcatatgcacacagtgccgcatggcacagggtggaaagaaattcggtgagagatggacccgcgttggattagcttgttggcggggtaacggcccaccaaggcgatgatccatagccggcctgagagggcgaccgg

SEQ ID NO: 5456 - DNA, 301 bp, Unknown
  Ascusbbf_876D, encodes 16S rRNA
agagtttgatcatggctcaggatgaacgctggcggcgtgcctaacacatgcaagtcgagcggagtgaagagagcttgcttttttcacttagcggcggatgggtgaggaacgcgtggggaacctgcctctcacagggggataacagctggaaacggctgttaataccgcatatgcacacagtgccgcatggcacagggtggaaagaaattcggtgagagatggacccgcgttggattagcttgttggcggggtaacggcccaccaaggcgatgatccatagccggcctgagagggcgaccgg

SEQ ID NO: 5457 - DNA, 225 bp, Unknown
  Ascusbbf_876E, encodes 16S rRNA
agagtttgatcatggctcaggatgaacgctggcggcgtgcctaacacatgcaagtcgagcggagtgaagagagcttgcttttttcactcagcggcggatgggtgaggaacgcgtggggaacctgcctctcacagggggataacagctggaaacggctgttaataccgcatatgcacacagtgccgcatggcacagggtggaaagaaattcggtgagagatggacc

SEQ ID NO: 5458 - DNA, 301 bp, Unknown
  Ascusbbf_876F, encodes 16S rRNA
agagtttgatcatggctcaggatgaacgctggcggcgtgcctaacacatgcaagtcgagcggagtgaagagagcttgcttttttcactcagcggcggatgggtgaggaacgcgtggggaacctgcctctcacagggggataacagctggaaacggctgttaataccgcatatgcacacagtgccgcatggcacagggtggaaagaaattcggtgagagatggacccgcgttggattagcttgttggcggggtaacggcccaccaaggcgatgatccatagccggcctgagagggcgaccgg

SEQ ID NO: 5459 - DNA, 300 bp, Unknown
  Ascusbbf_876G, encodes 16S rRNA
agagtttgatcatggctcaggatgaacgctggcggcgtgcctaacacatgcaagtcgagcggagtgaagagagcttgcttttttcacttagcggcggatgggtgaggaacgcgtggggaacctgcctctcacagggggataacagctggaaacggctgttaataccgcatatgcacacagtgccgcatggcacagggtggaaagaaattcggtgagagatggacccgcgttggattagcttgttggcggggtaacggcccaccaaggcgatgatccatagccggcctgagagggcgaccg

SEQ ID NO: 5460 - DNA, 299 bp, Unknown
  Ascusbbf_4936A, encodes 16S rRNA
agagtttgatcatggctcaggacgaacgctggcggcgtgcttaacacatgcaagtcgaacggggcgattagaagcttgcttttatgagcctagtggcaaacgggtgagtaacgcgtaggcaacctgcctctaagatggggacaacagagcgaaagttctgctaataccgaatgttgtaagtaactcgcatgagggacttaccaaagatggccgctacttgtaagctatcacttagagatgggcctgcgtctgattagctagttggtggggtaacggcccaccaaggcgacgatcagtag

SEQ ID NO: 5461 - DNA, 301 bp, Unknown
  Ascusbbf_4936B, encodes 16S rRNA
agagtttgatcatggctcaggacgaacgctggcggcgtgcttaacacatgcaagtcgaacgggactgattgaaagcttgcttttgaaaagtctagtggcaaacgggtgagtaacgcgtaggcaacctgcctctaagatggggacaacagcccgaaagggctgctaataccgaatgttgtaagtaactcgcatgagagacttaccaaagatggcctctacttgtaagctatcacttagagatgggcctgcgtctgattagctagttggtgaggtaacggctcaccaaggcgacgatcagtag

SEQ ID NO: 5462 - DNA, 301 bp, Unknown
  Ascusbbf_113152A, encodes 16S rRNA
agagtttgatcctggctcaggatgaacgctggcggcgtgcttaacacatgcaagtcgaacggactttacatgaaacctagtgattgtaaagttagtggcggacgggtgagtaacgcgtgaataacctgccttgtactgggggacaacagttggaaacggctgctaataccgcataagcgcacggttccgcatggaacagtgtgaaaaactccggtggtacaagatggattcgcgtctgattagccagttggcggggtaacggcccaccaaagcgacgatcagtagccggcctgagagggtg

SEQ ID NO: 5463 - DNA, 301 bp, Unknown
  Ascusbbf_9031A, encodes 16S rRNA
agagtttgatcatggctcaggatgaacgctagctacaggcttaacacatgcaagtcgaggggcagcatggtcttagcttgctaagattgatggcgaccggcgcacgggtgagtaacgcgtatccaaccttccctatagtaggggatagcccgtagaaatgcggattaataccctatgttgtattttgaggacatctgacgaataccaaaggtttaccgctataggatggggatgcgtctgattaggttgttggtggggtaacggcccaccaagcctacgatcagtaggggttctgagagga

SEQ ID NO: 5464 - DNA, 300 bp, Unknown
  Ascusbbf_9031B, encodes 16S rRNA
agagtttgatcatggctcaggacgaacgctggcggcgtgcttaacacatgcaagtcgagcgatgaagttccttcgggaatggattagcggcggacgggtgagtaacacgtgggtaacctgcctcatagaggggaatagcctttcgaaaggaagattaataccgcataagattgtagtgccgcatggcatagcaattaaaggagtaatccgctatgagatggacccgcgtcgcattagctagttggtgaggtaacggctcaccaaggcgacgatgcgtagccgacctgagagggtgatcgg

SEQ ID NO: 5465 - DNA, 301 bp, Unknown
  Ascusbbf_9031C, encodes 16S rRNA
agagtttgatcatggctcaggatgaacgctagctacaggcttaacacatgcaagtcgaggggcagcatggtcttagcttgctaagattgatggcgaccggcgcacgggtgagtaacgcgtatccaaccttccctatagtaggggatagcccgtagaaatgcggattaataccctatgttgtattttgaggacatctgacgaataccaaaggtttaccgctataggatggggatgcgtctgattaggttgttggcggggtaacggcccaccaagcctacgatcagtaggggttctgagagga

SEQ ID NO: 5466 - DNA, 301 bp, Unknown
  Ascusbbf_9031D, encodes 16S rRNA
agagtttgatcctggctcaggatgaacgctagctacaggcttaacacatgcaagtcgaggggcagcatggtcttagcttgctaagattgatggcgaccggcgcacgggtgagtaacgcgtatccaaccttccctatagtaggggatagcccgtagaaatgcggattaataccctatgttgtatttcgatgacatctgacgaataccaaaggttcaccgctataggatggggatgcgtctgattaggtagtcggcggggtaacggcccaccgagccaacgatcagtaggggttctgagagga

SEQ ID NO: 5467 - DNA, 300 bp, Unknown
  Ascusbbf_9031E, encodes 16S rRNA
agagtttgatcatggctcaggatgaacgctagctacaggcttaacacatgcaagtcgaggggcagcatggtcttagcttgctaagattgatggcgaccggcgcacgggtgagtaacgcgtatccaaccttccctatagtaggggatagcccgtagaaatgcggattaataccctatgttgtatttcgatgacatctgacgaataccaaaggttcaccgctataggatggggatgcgtctgattaggtagtcggcggggtaacggcccaccgagccaacgatcagtaggggttctgagagg

SEQ ID NO: 5468 - DNA, 301 bp, Unknown
  Ascusbbf_9031F, encodes 16S rRNA
agagtttgatcatggctcaggatgaacgctagctacaggcttaacacatgcaagtcgaggggcagcatggtcttagcttgctaagattgatggcgaccggcgcacgggtgagtaacgcgtatccaaccttccctatagtaggggatagcccgtagaaatgcggattaataccctatgttgtattttgaggacatctgacgaataccaaaggttcaccgctataggatggggatgcgtctgattaggtagtcggcggggtaacggcccaccgagccaacgatcagtaggggttctgagagga

SEQ ID NO: 5469 - DNA, 301 bp, Unknown
  Ascusbbf_9031G, encodes 16S rRNA
agagtttgatcatggctcaggatgaacgctagctacaggcttaacacatgcaagtcgaggggcagcatggtcttagcttgctaaggccgatggcgaccggcgcacgggtgagtaacgcgtatccaaccttccctatagtaggggatagcccgtagaaatgcggattaataccctatgttgtattttgatgacatcagatgaataccaaaggtttaccgctataggatggggatgcgtctgattaggtagtcggcggggtaacggcccaccgagccatcgatcagtaggggttctgagagga

SEQ ID NO: 5470 - DNA, 300 bp, Unknown
  Ascusbbf_11823A, encodes 16S rRNA
agagtttgatcctggctcagaacgaatgctggcggtgcgtcttaagcatgcaagtcgaacggcaagggtagcttgctacccctagagtggcggactggtgagtaacgcgtaggtgatgtacctttcggatggggatagccagtagaaatattggataataccgaatacgatttcatatcttagaagtatgaaatgaaaagagctatggctctgccgatagaacggcctgcgtaatatcagcttgttggtgaggtaacggcccaccaaggctatgacatttatccggcctgagagggtgat

SEQ ID NO: 5471 - DNA, 300 bp, Unknown
  Ascusbbf_11823B, encodes 16S rRNA
agagtttgatcatggctcagaacgaatgctggcggtgcgtcttaagcatgcaagtcgaacggcaagggtagcttgctacccctagagtggcggactggtgagtaacgcgtaggtgatgtacctttcggatggggatagccagtagaaatattggataataccgaatacgatttcatatcttagaagtatgaaatgaaaagagctatggctctgccgatagaacggcctgcgtaatatcagcttgttggtgaggtaacggcccaccaaggctatgacatttatccggcctgagagggtgat

SEQ ID NO: 5472 - DNA, 300 bp, Unknown
  Ascusbbf_11823C, encodes 16S rRNA
agagtttgatcatggctcagaacgaatgctggcggtgcgtcttaagcatgcaagtcgaacggcaagggtagcttgctacccctagagtggcggactggtgagtaacgcgtaggtgatgtacctttcggatggggatagccagtagaaatattggataataccgaatacgatttcatatcttagaagtatgaaatgaaaagagctatggctctgccgatagaacagcctgcgtaatatcagcttgttggtgaggtaacggcccaccaaggctatgacatttatccggcctgagagggtgat

SEQ ID NO: 5473 - DNA, 300 bp, Unknown
  Ascusbbf_1007A, encodes 16S rRNA
agagtttgatcctggctcaggatgaacgctagcgacaggcttaacacatgcaagtcgaggggcagcgtggcggtagcaatactgccgacggcgaccggcgcactggtgagtaacacgtatgcaacctgcccctggttgggggataacccgcggaaacgcggcctaataccccgtatgcgccgaggccgcatgacttcggcgtgatagaatttcgtccagggatgggcatgcggcgcattagctagttggcggggcaacggcccaccaaggcaacgatgcgtaggggttctgagaggaagg

SEQ ID NO: 5474 - DNA, 301 bp, Unknown
  Ascusbbf_24422A, encodes 16S rRNA
agagtttgatcctggctcaggatgaacgctagctacaggcttaacacatgcaagtcgaggggcagcatggggatggcttgccattcccgatggcgaccggcgcacgggtgagtaacgcgtatccaacctgcccgcaaccgcggaatagcccgccgaaaggcggattaatgccgcatgagctcgcgtgagggcatctgcccgcgagcaaaggttcgttccggttgcggatggggatgcgtccgattaggcagcaggcggggcaacggcccacctggcccgcgatcggtaggggttctgagag

SEQ ID NO: 5475 - DNA, 300 bp, Unknown
  Ascusbbf_951A, encodes 16S rRNA
agagtttgatcatggctcaggatgaacgctggcggcgcgcctaacacatgcaagtcgaacggttaaagcaccttcgggtgtgtataaagtggcgaacggctgagtaacacgtgggcaacctgcccctcgcaccgggatagcctcgggaaaccgtggttaataccggatactccgggacccccgcatgggggcgccgggaaagccctgacggcgagggatgggcccgcggcctgttagcttgttggcggggtaacggcccaccaaggcgattatgggtagccgggttgagagaccgaccgg

SEQ ID NO: 5476 - DNA, 300 bp, Unknown
  Ascusbbf_951B, encodes 16S rRNA
agagtttgatcctggctcaggatgaacgctggcggcgcgcctaacacatgcaagtcgaacggttaaagcaccttcgggtgtgtataaagtggcgaacggctgagtaacacgtgggcaacctgcccctcgcaccgggatagcctcgggaaaccgtggttaataccggatactccgggacccccgcatgggggtgccgggaaagccctgacggcgagggatgggcccgcggcctgttagcttgttggcggggtaacggcccaccaaggcgattatgggtagccgggttgagagaccgaccgg

SEQ ID NO: 5477 - DNA, 300 bp, Unknown
  Ascusbbf_951C, encodes 16S rRNA
agagtttgatcctggctcaggatgaacgctggcggcgcgcctaacacatgcaagtcgaacggttaaagcaccttcgggtgtgtataaagtggcgaacggctgagtaacacgtgggcaacctgcccctcgcaccgggatagcctcgggaaaccgtggttaataccggatactccgggacccccgcatgggggtgccgggaaagccctgacggcgagggatgggcccgcggcctgttagcttgttggcgggggaacggcccaccaaggcgattatgggtagccgggttgagagaccgaccgg

SEQ ID NO: 5478 - DNA, 300 bp, Unknown; identical to SEQ ID NO: 5475
  Ascusbbf_951D, encodes 16S rRNA

SEQ ID NO: 5479 - DNA, 300 bp, Unknown
  Ascusbbf_951E, encodes 16S rRNA
agagtttgatcctggctcaggatgaacgctggcggcgcgcctaacacatgcaagtcgaacggttaaagcaccttcgggtgtgtataaagtggcgaacggctgagtaacacgtgggcaacctgcccctcgcacagggatagcctcgggaaaccgtggttaatacctgatactccgggacccccgcatgggggacccgggaaagctccgacggcgagggatgggcccgcggcctgttagcttgttggcggggtaacggcccaccaaggcaatgatgggtagccgggttgagagaccgaccgg

SEQ ID NO: 5480 - DNA, 298 bp, Unknown
  Ascusbbf_951F, encodes 16S rRNA
agagtttgatcatggctcaggacgaacgctggcggcgtgcttaacacatgcaagtcgaacgagaagagatgagaagcttgcttcttattgattcgagtggcaaacgggtgagtaacgcgtaagcaacctgcccttcagatggggacaacagctggaaacggctgctaataccgaatacgttctttttgtcgcatggcagagagaagaaagggaggctcttcggagctttcgctgaaggaggggcttgcgtctgattagctagttggaggggtaacggcccaccaaggcgacgatcagt

SEQ ID NO: 5481 - DNA, 298 bp, Unknown
  Ascusbbf_951G, encodes 16S rRNA
agagtttgatcatggctcaggacgaacgctggcggcgtgcttaacacatgcaagtcgaacgagaagagatgagaagcttgcttcttattaattcgagtggcaaacgggtgagtaacgcgtaagcaacctgcccttcagatggggacaacagctggaaacggctgctaataccgaatacgttctttttgtcgcatggcagagagaagaaagggaggctcttcggagctttcgctgaaggaggggcttgcgtctgattagctagttggaggggtaacggcccaccaaggcgacgatcagt

SEQ ID NO: 5482 - DNA, 300 bp, Unknown
  Ascusbbf_5699A, encodes 16S rRNA
agagtttgatcctggctcagaacgaacgctggcggcgcgtcttaagcatgcaagtcgagcgggattgggtagcttgctactcatgagagcggcggactggtgagtaacgcgtgggtgacgtaccctttagacggggatagctcctagaaataggaggtaataccggatacgatagtgagtgtcagaggctcattatgaaaggttcttttgaaccgctgaaggagcggcccgcgtactattagctggttggtgaggtaacggcccaccaaggcgacgatagttatccggcctgagagggtg

SEQ ID NO: 5483 - DNA, 300 bp, Unknown
  Ascusbbf_5699B, encodes 16S rRNA
agagtttgatcctggctcagaacgaacgctggcggcgcgtcttaagcatgcaagtcgagcgggattgggtagcttgctatccatgagagcggcggactggtgagtaacgcgtgggtgacgtacccttcagacggggatagctcctagaaataggaggtaataccggatacgatagtgagtgtcagaggctcattatgaaaggttcttttgaaccgctgaaggagcggcccgcgtactattagctagttggtgaggtaacggcccaccaaggcgacgatagttatccggcctgagagggtg

SEQ ID NO: 5484 - DNA, 300 bp, Unknown
  Ascusbbf_5699C, encodes 16S rRNA
agagtttgatcatggctcagaacgaacgctggcggcgcgtcttaagcatgcaagtcgagcgggattgggtagcttgctactcatgagagcggcggactggtgagtaacgcgtgggtgacgtacccttcagacggggatagctcctagaaataggaggtaataccggatacgatagtgagtgtcagaggctcattatgaaaggttcttttgaaccgctgaaggagcggcccgcgtactattagctagttggtgaggtaacggcccaccaaggcgacgatagttatccggcctgagagggtg

SEQ ID NO: 5485 - DNA, 300 bp, Unknown
  Ascusbbf_5699D, encodes 16S rRNA
agagtttgatcctggctcagaacgaacgctggcggcgcgtcttaagcatgcaagtcgagcgggattgggtagcttgctactcatgagagcggcggactggtgagtaacgcgtgggtgacgtacccttcagacggggatagctcctagaaataggaggtaataccggatacgatagtgagtgtcagaggctcattatgaaaggttcttttgaaccgctgaaggagcggcccgcgtactattagcttgttggtgaggtaacggcccaccaaggcgacgatagttatccggcctgagagggtg

SEQ ID NO: 5486 - DNA, 300 bp, Unknown
  Ascusbbf_130A, encodes 16S rRNA
agagtttgatcctggctcaggatgaacgctagctacaggcttaacacatgcaagtcgaggggcagcatgaagtttgcttgcaaactttgatggcgaccggcgcacgggtgagtaacgcgtatccaaccttccccttactagggaatagcccggcgaaagtcggattaatgccctatgttctcctttgcgggcatctaacgaggagcaaagattcatcggtaagggatggggatgcgtctgattagccagttggcggggtaacggcccaccaaggcgacgatcagtaggggttctgagagg

SEQ ID NO: 5487 - DNA, 301 bp, Unknown
  Ascusbbf_130B, encodes 16S rRNA
agagtttgatcctggctcaggatgaacgctagctacaggcttaacacatgcaagtcgaggggcagcatgaagtttgcttgcaaactttgatggcgaccggcgcacgggtgagtaacgcgtatccaaccttccccttactagggaatagcccggcgaaagtcgaattaatgccctatgttctccttcgcgggcatctaacgaggagcaaagattcatcggtaagggatggggatgcgactgattaggcagtcggcggggtaacggcccaccgagccgacgatcagtaggggttctgagagga

SEQ ID NO: 5488 - DNA, 301 bp, Unknown
  Ascusbbf_130C, encodes 16S rRNA
agagtttgatcatggctcaggatgaacgctagctacaggcttaacacatgcaagtcgaggggcagcatgaagtttgcttgcaaactttgatggcgaccggcgcacgggtgagtaacgcgtatccaaccttccccttactagggaatagcccggcgaaagtcggattaatgccctatgttctccttcgcgggcatctaacgaggagcaaagattcatcggtaagggatggggatgcgtctgattaggcagtcggcggggtaacggcccaccgagccgacgatcagtaggggttctgagagga

SEQ ID NO: 5489 - DNA, 301 bp, Unknown
  Ascusbbf_130D, encodes 16S rRNA
agagtttgatcctggctcaggatgaacgctagctacaggcttaacacatgcaagtcgaggggtaacgacagcgaaagcttgcttttgctgggcgacgaccggcgaatgggtgagtaacgcgtatccaacctgccgcaaagtagggcacagccttgcgaaagtaagattaatgccctatgtgctgtgatgatgacatcagaattgcagtaaaggttcaccgctttgcgatggggatgcgtctgattaggttgttggcggggtaacggcccaccaagcccgcgatcagtaggggttctgagag

SEQ ID NO: 5490 - DNA, 300 bp, Unknown
  Ascusbbf_130E, encodes 16S rRNA
agagtttgatcctggctcaggatgaacgctagctacaggcttaacacatgcaagtcgaggggcagcatgaagtttgcttgcaaactttgatggcgaccggcgcacgggtgagtaacgcgtatccaaccttccccttactagggaatagcccggcgaaagtcggattaatgccctatgttctccttcgcgggcatctaacgaggagcaaagattcatcggtaagggatggggatgcgtctgattaggcagtcggcggggtaacggcccaccgagccgacgatcagtaggggttctgagagg

SEQ ID NO: 5491 - DNA, 300 bp, Unknown
  Ascusbbf_130F, encodes 16S rRNA
agagtttgatcatggctcaggatgaacgctagctacaggcttaacacatgcaagtcgaggggcagcatgaagtttgcttgcaaactttgatggcgaccggcgcacgggtgagtaacgcgtatccaaccttccccttactagggaatagcccggcgaaagtcggattaatgccctatgttctcctttgcgggcatctaacgaggagcaaagattcatcggtaagggatggggatgcgtctgattagccagttggcggggtaacggcccaccaaggcgacgatcagtaggggttctgagagg

SEQ ID NO: 5492 - DNA, 301 bp, Unknown
  Ascusbbf_130G, encodes 16S rRNA
agagtttgatcctggctcaggatgaacgctagctacaggcttaacacatgcaagtcgaggggcagcatgaagtttgcttgcaaactttgatggcgaccggcgcacgggtgagtaacgtgtatccaaccttccccttactagggaatagcccggcgaaagtcggattaatgccctatgttctcctttgcgggcatctaacgaggagcaaagattcatcggtaagggatggggatgcgtctgattagccagttggcggggtaacggcccaccaaggcgacgatcggtaggggttctgagagga

SEQ ID NO: 5493 - DNA, 225 bp, Unknown
  Ascusbbf_10109A, encodes 16S rRNA
aagtttgctcctggctcaggacgcacgctggcggcgtgcttaacacatgcaagtcgaacggagaatttgcttcggtgaattcttagtggcgaacgggtgagtaacgcgtaggcaacctgccctctggttggggacaacattccgaaagggatgctaataccgaatgtgctcgcacctccgcatggaggtgcgaggaaagatggcctctacttgtaagctatcgcc

SEQ ID NO: 5494 - DNA, 225 bp, Unknown
  Ascusbbf_10109B, encodes 16S rRNA
agagtttgatcatggctcaggacgaacgctggcggcgtgcttaacacatgcaagtcgaacggagaatttgcttcggtgaattcttagtggcgaacgggtgagtaacgcgtaggcaacctgccctctggttggggacaacattccgaaagggatgctaataccgaatgtgctcacacttccgcatggaggtgtgaggaaagatggcctctacttgtaagctatcgc

SEQ ID NO: 5495 - DNA, 298 bp, Unknown
  Ascusbbf_10109C, encodes 16S rRNA
agagtttgatcctggctcaggacgaacgctggcggcgtgcttaacacatgcaagtcgaacggagaatttgcttcggtgaattcttagtggcgaacgggtgagtaacgcgtaggcaacctgccctctggttggggacaacattccgaaagggatgctaataccgaatgtgctcccttctccgcatggagaagggaggaaagatggcctctacttgtaagctatcgccagaagatgggcctgcgtctgattagctagtaggtggggtaacggctcacctaggcgatgatcagtagccggt

SEQ ID NO: 5496 - DNA, 297 bp, Unknown
  Ascusbbf_10109D, encodes 16S rRNA
agagtttgatcctggctcaggacgaacgctggcggcgtgcttaacacatgcaagtcgaacggagaatttgcttcggtgaattcttagtggcgaacgggtgagtaacgcgtaggcaacctgccctctggttggggacaacattccgaaagggatgctaataccgaatgtgctcgcacctccgcatggaggtgcgaggaaagatggcctctacttgtaagctatcgccagaagatgggcctgcgtctgattagctagtaggtggggtaacggctcacctaggcgatgatcagtagccgg

SEQ ID NO: 5497 - DNA, 298 bp, Unknown
  Ascusbbf_10109E, encodes 16S rRNA
agagtttgatcatggctcaggacgaacgctggcggcgtgcttaacacatgcaagtcgaacggagaatttgcttcggtgaattcttagtggcgaacgggtgagtaacgcgtaggcaacctgccctctggttggggacaacattccgaaagggatgctaataccgaatgtgctcgcacctccgcatggaggtgcgaggaaagatggcctctacttgtaagctatcgccagaagatgggcctgcgtctgattagctagtaggtggggtaacggctcacctaggcgatgatcagtagccggt

SEQ ID NO: 5498 - DNA, 298 bp, Unknown
  Ascusbbf_10109F, encodes 16S rRNA
agagtttgatcctggctcaggacgaacgctggcggcgtgcttaacacatgcaagtcgaacggagaatttgcttcggtgaattcttagtggcgaacgggtgagtaacgcgtaggcaacctgccctctggttggggacaacattccgaaagggatgctaataccgaatgtgctcacacctccgcatggaggtgtgaggaaagatggcctctacttgtaagctatcgccagaagatgggcctgcgtctgattagctagtaggcggggtaacggctcacctaggcgatgatcagtagccggt

SEQ ID NO: 5499 - DNA, 298 bp, Unknown
  Ascusbbf_10109G, encodes 16S rRNA
agagtttgatcctggctcaggacgaacgctggcggcgtgcttaacacatgcaagtcgaacggagaatttgcttcggtgaattcttagtggcgaacgggtgagtaacgcgtaggcaacctgccctctggttggggacaacattccgaaagggatgctaataccgaatgtgctcacacttccgcatggaggtgtgaggaaagatggcctctacttgtaagctatcgccagaagatgggcctgcgtctgattagctagtaggtggggtaacggctcacctaggcgatgatcagtagccggt

SEQ ID NO: 5500 - DNA, 298 bp, Unknown
  Ascusbbf_10109H, encodes 16S rRNA
agagtttgatcatggctcaggacgaacgctggcggcgtgcttaacacatgcaagtcgaacggagaatttgcttcggtgaattcttagtggcgaacgggtgagtaacgcgtaggcaacctgccctctggttggggacaacattccgaaagggatgctaataccgaatgtgctcacacttccgcatggaggtgtgaggaaagatggcctctacttgtaagctatcgccagaagatgggcctgcgtctgattagctagtaggtggggtaacggctcacctaggcgatgatcagtagccggt

SEQ ID NO: 5501 - DNA, 297 bp, Unknown
  Ascusbbf_10109I, encodes 16S rRNA
aagtttgatcatggctcaggacgaacgctggcggcgtgcttaacacatgcaagtcgaacggagaatttgcttcggtgaattcttagtggcgaacgggtgagtaacgcgtaggcaacctgccctctggttggggacaacattccgaaagggatgctaataccgaatgtgctcgcacctccgcatggaggtgcgaggaaagatggcctctacttgtaagctatcgccagaagatgggcctgcgtctgattagctagtaggtggggtaacggctcacctaggcgatgatcagtagccggt

SEQ ID NO: 5502 - DNA, 300 bp, Unknown
  Ascusbbf_29797A, encodes 16S rRNA
agagtttgatcatggctcaggatgaacgctagcgacaggcttaacacatgcaagtcgaggggcagcatgggaggtggcaacaccacccgatggcgaccggcgcactggtgagtaacacgtatgcaacctgccccctacaggggaataacccagagaaatttggcctaataccccgtagtcagcgagagggcatcctcctgctgggaaagctccggcggtaggggatgggcatgcggcgcattagcttgttggcggggcgacggcccaccaaggcgacgatgcgtaggggttctgagagga

SEQ ID NO: 5503 - DNA, 225 bp, Unknown
  Ascusbbf_54068A, encodes 16S rRNA
agagtttgatcatggctcaggatgaacgctggcggcgtgcctaacacatgcaagtcgaacggagtttttattgatttcttcggattgatatagaaacttagtggcggacgggtgagtaacacgtgggtaacctgccttacagagggggatagcagctggaaacggctgataataccgcataagcacacagtaccgcatggtacagggtgaaaagatttatcactg

SEQ ID NO: 5504 - DNA, 300 bp, Unknown; identical to SEQ ID NO: 5476
  Ascusbbf_54068B, encodes 16S rRNA

SEQ ID NO: 5505 - DNA, 296 bp, Unknown
  Ascusbbf_54068C, encodes 16S rRNA
agagtttgatcatggctcaggatgaacgctggcggcgtgcctaacacatgcaagtcgaacggagtttttattgatttcttcggattgatatagaaacttagtggcggacgggtgagtaacacgtgggtaacctgccttacagagggggatagcagctggaaacggctgataataccgcataagcacacagtaccgcatggtacagggtgaaaagatttatcactgtaagatggacccgcgtctgattagccagttggcagggtaacggcctaccaaagcgacgatcagtagccgac

SEQ ID NO: 5506 - DNA, 301 bp, Unknown
  Ascusbbf_54068D, encodes 16S rRNA
agagtttgatcctggctcaggatgaacgctggcggcgtgcctaacacatgcaagtcgaacggagtttttattgatttcttcggattgatatagaaacttagtggcggacgggtgagtaacacgtgggtaacctgccttacagagggggatagcagctggaaacggctgataataccgcataagcacacagtaccgcatggtacagggtgaaaagatttatcactgtaagatggacccgcgtctgattagccagttggcagggtaacggcctaccaaagcgacgatcagtagccgacctgag

SEQ ID NO: 5507 - DNA, 225 bp, Unknown
  Ascusbbf_7003A, encodes 16S rRNA
agagtttgatcatggctcaggatgaacgctggcggcgtgcctaacacatgcaagtcgaacgaggtaaatgagatgaagttttcggatggattcttatttaccgagtggcggacgggtgagtaacgcgtgggtaacctgcctcatacagggggataacgattggaaacgattgctaataccgcataagcgcacagtaccacatggtacagtgtgaaaaactccggt

SEQ ID NO: 5508 - DNA, 298 bp, Unknown; identical to SEQ ID NO: 5480
  Ascusbbf_7003C, encodes 16S rRNA

SEQ ID NO: 5509 - DNA, 301 bp, Unknown
  Ascusbbf_23A, encodes 16S rRNA
agagtttgatcctggctcaggatgaacgctggcggcgtgcttaacacatgcaagtcgaacggagaatcgcccttcgggacggttcttagtggcggacgggtgagtaacgcgtgaggaacctgccttggagtggggaataacggctggaaacggccgctaataccgcataatgcagttgggtcgcatggctctgactgccaaagatttattgctctgagatggcctcgcgtctgattagctggttggtgaggtaacggctcaccaaggcgacgatcagtagccggactgagaggttggccgg

SEQ ID NO: 5510 - DNA, 300 bp, Unknown
  Ascusbbf_1697A, encodes 16S rRNA
agagtttgatcatggctcaggatgaacgctagctacaggcttaacacatgcaagtcgaggggcagcgggaagttagcttgctaactttgccggcgaccggcgcacgggtgagtaacgcgtatccaaccttccccttagtagggcatagcccgatgaaaatcggattaataccctatgttttccaatgaggacatctgagctggaacaaagattcatcgctaagggatggggatgcgtccgattaggtagtcggcggggtaacggcccaccgagccatcgatcggtaggggttctgagagg

SEQ ID NO: 5511 - DNA, 300 bp, Unknown
  Ascusbbf_1697B, encodes 16S rRNA
agagtttgatcatggctcaggatgaacgctagctacaggcttaacacatgcaagtcgaggggcagcgggaagttagcttgctaactttgccggcgaccggcgcacgggtgagtaacgcgtatccaaccttccccttagtagggcatagcccgatgaaaatcggattaataccctatgttttccaatgaggacatctgagctggaacaaagattcatcgctaagggatggggatgcgtccgattaggtagtcggcggggtaacggcccaccgagcccgcgatcggtaggggttctgagagg

SEQ ID NO: 5512 - DNA, 301 bp, Unknown
  Ascusbbf_1697C, encodes 16S rRNA
agagtttgatcatggctcaggatgaacgctagctacaggcttaacacatgcaagtcgaggggcagcaggatcttagcttgctaagattgctggcgaccggcgcacgggtgagtaacgcgtatccaaccttccccttagtagggcatagcccgatgaaaatcggattaataccctatgttttccaatgaggacatctgagctggaacaaagattcatcgctaagggatggggatgcgtccgattaggtagtcggcggggtaacggcccaccgagccatcgatcggtaggggttctgagagga

SEQ ID NO: 5513 - DNA, 300 bp, Unknown
  Ascusbbf_7586A, encodes 16S rRNA
agagtttgatcatggctcaggatgaacgctagctacaggcttaacacatgcaagtcgaggggcagcatgaggtttgcttgcaaaccttgatggcgaccggcgcacgggtgcgcaacgcgtatccaaccttccagctactagggaatagcccgttgaaagacggattaatgccctatgtgttcattagatggcatcagatgttgaacaaagattcatcggtagctgatggggatgcgtatgattagctagtcggcggggcaacggcccaccgaggctacgatcattaggggttctgagagg

SEQ ID NO: 5514 - DNA, 300 bp, Unknown
  Ascusbbf_7586B, encodes 16S rRNA
agagtttgatcatggctcaggatgaacgctagctacaggcttaacacatgcaagtcgaggggcagcatgaggtttgcttgcaaaccttgatggcgaccggcgcacgggtgcgtaacgcgtatccaaccttccagctactagggaatagcccgttgaaagacggattaatgccctatgtgttcattagatggcatcagatgttgaacaaagattcatcggtagctgatggggatgcgtatgattagctagtcggcggggtaacggcccaccgaggctacgatcattaggggttctgagagg

SEQ ID NO: 5515 - DNA, 300 bp, Unknown
  Ascusbbf_7586C, encodes 16S rRNA
agagtttgatcctggctcaggatgaacgctagctacaggcttaacacatgcaagtcgaggggcagcatgaggtttgcttgcaaaccttgatggcgaccggcgcacgggtgcgtaacgcgtatccaaccttccagctactagggaatagcccgttgaaagacggattaatgccctatgtgttcattagatggcatcagatgttgaacaaagattcatcggtagctgatggggatgcgtatgattagctagtcggcggggtaacggcccaccgaggctacgatcattaggggttctgagagg

SEQ ID NO: 5516 - DNA, 300 bp, Unknown; identical to SEQ ID NO: 5514
  Ascusbbf_7586D, encodes 16S rRNA

SEQ ID NO: 5517 - DNA, 301 bp, Unknown
  Ascusbbf_1034A, encodes 16S rRNA
agagtttgatcatggctcaggatgaacgctggcggcgtgcctaacacatgcaagtcgaacgaagcacttctggtttgagattcgtcaagaaccgggattgacttagtggcggacgggtgagtaatgtatgagcaacctgcctttcagagggggacaacagttggaaacgactgctaataccgcataatgtatttgggtggcatcacctggataccaaaggagcaatccgctgaaagatgggctcatatctgattagttagttggcagggtaacggcctaccaagactgcgatcagtagccg

SEQ ID NO: 5518 - DNA, 301 bp, Unknown
  Ascusbbf_1034B, encodes 16S rRNA
agagtttgatcctggctcaggatgaacgctggcggcgtgcctaacacatgcaagtcgaacgaagcacttctggtttgagattcgtcaagaaccgggattgacttagtggcggacgggtgagtaatgtatgagcaacctgcctttcagagggggacaacagttggaaacgactgctaataccgcataatgtatttgggtggcatcacctggataccaaaggagcaatccgctgaaagatgggctcatatctgattagttagttggcagggtaacggcctaccaagactgcgatcagtagccg

SEQ ID NO: 5519 - DNA, 300 bp, Unknown
  Ascusbbf_23134A, encodes 16S rRNA
agagtttgatcatggctcaggatgaacgctagcggcaggcttaacacatgcaagtcgaggggcatcgcggtgtagcaatacactggcggcgaccggcggaagggtgcgtaacgcgtgagcaacatgcccgtggcagggggataatcgatggaaacgtcgtctaagaccccgtaacaagtgggatcgcatgatcctgttttgaaagcttcggcggccacggattggctcgcgtcccattaggtagtcggcggggtaacggcccaccgagccgacgatgggtaggggttctgagaggaaggt

SEQ ID NO: 5520 - DNA, 300 bp, Unknown
  Ascusbbf_43679A, encodes 16S rRNA
agagtttgatcctggctcaggatgaacgctagcggcaggcttaacacatgcaagtcgaggggcagcgcggtgtagcaatacactggcggcgaccggcgcaagggtgcgtaacgcgtgagcgacatacccgtgactggggcataaccgatggaaacgtcgcctaattccccataatacaagggaccgcatgattccttgttgaaaacttcggtggtcacggattggctcgcgtcccattagctagtcggcggggtaacggcccaccgaggcgacgatgggtaggggttctgagaggaaggt

SEQ ID NO: 5521 - DNA, 300 bp, Unknown
  Ascusbbf_43679B, encodes 16S rRNA
agagtttgatcatggctcaggatgaacgctagctacaggcttaacacatgcaagtcgaggggcagcgcggtgtagcaatacactggcggcgaccggcgcaagggtgcgtaacgcgtgagcgacatacccgtgactggggcataaccgatggaaacgtcgcctaattccccataatacaagggaccgcatggttccttgttgaaaacttcggtggtcacggattggctcgcgtcccattagctagtcggcggggtaacggcccaccgaggcgacgatgggtaggggttctgagaggaaggt

SEQ ID NO: 5522 - DNA, 299 bp, Unknown
  Ascusbbf_43679C, encodes 16S rRNA
agagtttgatcctggctcaggatgaacgctagcggcaggcttaacacatgcaagtcgaggggcagcgcggggtagcaataccctggcggcgaccggcgcaagggtgcgtaacgcgtgagcgacatacccgtgactggggcataaccgatggaaacgtcgcctaattccccataatacaagggaccgcatggttccttgttgaaaacttcggtggtcacggattggctcgcgtcccattagctagtcggcggggtaacggcccaccgaggcgacgatgggtaggggttctgagaggaagg

SEQ ID NO: 5523 - DNA, 300 bp, Unknown
  Ascusbbf_43679D, encodes 16S rRNA
agagtttgatcctggctcaggatgaacgctagcggcaggcttaacacatgcaagtcgaggggcagcgcggtgtagcaatacactggcggcgaccggcgcaagggtgcgtaacgcgtgagcgacatacccgtgactggggcataaccgatggaaacgtcgcctaattccccataatacaagggaccgcatgattccttgttgaaaacttcggtggtcacggattggctcgcgtcccattagctagtcggcggggtaacggcccaccgaggcgacgatgggtagggggtctgagaggaaggt

SEQ ID NO: 5524 - DNA, 300 bp, Unknown
  Ascusbbf_43679E, encodes 16S rRNA
agagtttgatcatggctcaggatgaacgctagcggcaggcttaacacatgcaagtcgaggggcagcgcggtgtagcaatacactggcggcgaccggcgcaagggtgcgtaacgcgtgagcgacatacccgtgactggggcataaccgatggaaacgtcgcctaattccccataatacaagggaccgcatgattccttgttgaaaacttcggtggtcacggattggctcgcgtcccattagctagtcggcggggtaacggcccaccgaggcgacgatgggtaggggttctgagaggaaggt

SEQ ID NO: 5525 - DNA, 300 bp, Unknown
  Ascusbbf_43679F, encodes 16S rRNA
agagtttgatcatggctcaggatgaacgctagcggcaggcttaacacatgcaagtcgaggggcagcgcggggtagcaatatcctggcggcgaccggcgcaagggtgcgtaacgcgtgagcgacatacccgtgactggggcataaccgatggaaacgtcgcctaattccccataacacaagggtccgcatggtcctttgttgaaaacttcggtggtcacggattggctcgcgtcccattagctagtcggcggggtaacggcccaccgaggcgacgatgggtaggggttctgagaggaaggt

SEQ ID NO: 5526 - DNA, 301 bp, Unknown
  Ascusbbf_63954A, encodes 16S rRNA
agagtttgatcatggctcaggatgaacgctagcggtaggcttaacacatgcaagtcgaggggcagcgtatcgagtagcaatacttgatgacggcgaccggcggatgggtgagtaacgcgtatgcaacctaccttgtacagggggatagacactggaaacggtgcgtaatatcccgtaatgttgtggagaggcatcttttcacaaagaaaggagtgatctggtataagatgggcatgcgtaggattagctagatggtgaggtaacggctcaccatggctacgatctttaggggttctgagag

SEQ ID NO: 5527 - DNA, 298 bp, Unknown
  Ascusbbf_1517A, encodes 16S rRNA
agagtttgatcatggctcaggacgaacgctggcggcgtgcctaacacatgcaagtcgaacggggattttgtttcggcagaatcctagtggcgaacgggtgagtaacgcgtaggcaacctgccctccggccggggacaacactccgaaaggggtgctaataccggatacgaagtctgtgccgcatggtacggatttgaaagatggcctctatttataagctatcgccgggggatgggcctgcgtccgattagctggttggtggggtaacggcctaccaaggcgacgatcggtagccggt

SEQ ID NO: 5528 - DNA, 298 bp, Unknown
  Ascusbbf_1517B, encodes 16S rRNA
agagtttgatcctggctcaggacgaacgctggcggcgtgcctaacacatgcaagtcgaacggggattttgtttcggcagaatcctagtggcgaacgggtgagtaacgcgtaggcaacctgccctccggccggggacaacactccgaaaggggtgctaataccggatacgaagtctgtgccgcatggtacggatttgaaagatggcctctatttataagctatcgccgggggatgggcctgcgtccgattagctggttggtggggtaacggcctaccaaggcgacgatcggtagccggt

SEQ ID NO: 5529 - DNA, 298 bp, Unknown; identical to SEQ ID NO: 5451
  Ascusbbf_1517C, encodes 16S rRNA

SEQ ID NO: 5530 - DNA, 298 bp, Unknown
  Ascusbbf_1517D, encodes 16S rRNA
agagtttgatcctggctcaggacgaacgctggcggcgtgcctaacacatgcaagtcgaacggggattttgtttcggcagaatcctagtggcgaacgggtgagtaacgcgtaggcaacctgccctccggccggggacaacactccgaaaggggtgctaataccggatacgaagtctgtgccgcatggtacggatttgaaagatggcctctgtttacaagctatcgccgggggatgggcctgcgtccgattagctggttggtggggtaacggcctaccaaggcgacgatcggtagccggt

SEQ ID NO: 5531 - DNA, 298 bp, Unknown
  Ascusbbf_1517E, encodes 16S rRNA
agagtttgatcatggctcaggatgaacgctggcggcgtgcctaacacatgcaagtcgaacggggattttgtttcggcagaatcctagtggcgaacgggtgagtaacgcgtaggcaacctgccctccggccggggacaacactccgaaaggggtgctaataccggatacgaagtctgtgccgcatggtacggatttgaaagatggcctctatttataagctatcgccgggggatgggcctgcgtccgattagctggttggtggggtaacggcccaccaagcctacgatcagtaggggtt

SEQ ID NO: 5532 - DNA, 298 bp, Unknown
  Ascusbbf_1517F, encodes 16S rRNA
agagtttgatcatggctcaggacgaacgctggcggcgtgcctaacacatgcaagtcgaacggggattttgtttcggcagaaccctagtggcgaacgggtgagtaacgcataggcaacctgccctccggccggggacaacactccgaaaggggtgctaataccggatacgaagtctgtgccgcatggtacggatttgaaagatggcctctatttataagctatcgccgggggatgggcctgcgtcggattagctggttggtggggtaacggcctaccaaggcgacgatcggtagccagt

SEQ ID NO: 5533 - DNA, 298 bp, Unknown
  Ascusbbf_1517G, encodes 16S rRNA
agagtttgatcctggctcaggacgaacgctggcggcgtgcctaacacatgcaagtcgaacggggattttgtttcggcagaatcctagtggcgaacgggtgagtaacgcgtaggcaacctgccctccggccggggacaacactccgaaaggggtgctaataccggatacgaagtctgtgccgcatggtacggatttgaaagatggcctctatttataagctatcgccgggggatgggcctgcgtccgattagccggttggtggggtaacggcccaccaagccgacgatcggtaggggtt

SEQ ID NO: 5534 - DNA, 297 bp, Unknown
  Ascusbbf_1517H, encodes 16S rRNA
agagtttgatcatggctcaggacgaacgctggcggcgtgcctaacacatgcaagtcgaacggggattttgttttggcagaatcctagtggcgaacgggtgagtaacgcgtaggcaacctgccctccggccggggacaacactccgaaaggggtgctaataccggatacgaagtctgtgccgcatggtacggatttgaaagatggcctctatttataagctatcgccgggggatgggcctgcgtccgattagctggttggtggggtaacggcctaccaaggcgacgatgcatagccga

SEQ ID NO: 5535 - DNA, 298 bp, Unknown
  Ascusbbf_1517I, encodes 16S rRNA
agagtttgatcctggctcaggataaacgccggcggcgtgcctaacacatgcaagtcgaacggggattttgtttcggcagaatcctagtggcgaacgggtgagtaacgcgtaggcaacctgccctccggccggggacaacactccgaaaggggtgctaataccggatacgaagtctgtgccgcatggtacggatttgaaagatggcctctgtttacaagctatcgccgggggatgggcctgcgtccgattagctggttggtggggtaacggcctaccaaggcgacgatcggtagccggt

SEQ ID NO: 5536 - DNA, 225 bp, Unknown
  Ascusbbf_104A, encodes 16S rRNA
agagtttgatcatggctcaggataaacgctggcggcgtgcctaatacatgcaagtcgaacgaggaagacccagcttgctgggttgaccgagtggcgaacgggtgagtaatacataagcaacctgcccacggagaccgggataatctctggaaacggggactaaaaccggataggcagcaatgaggcatctcaatgctgttaaaggtgagagacactggtggatgg

SEQ ID NO: 5537 - DNA, 301 bp, Unknown
  Ascusbbf_104B, encodes 16S rRNA
agagtttgatcctggctcaggataaacgctggcggcgtgcctaatacatgcaagtcgaacgagggagacccagcttgctgggttgaccgagtggcgaacgggtgagtaatacataagcaacctgcccacggagaccgggataatctctggaaacggggactaaaaccggataggcagcaatgaggcatctcaatgctgttaaaggtgagagacactggtggatgggcttatggcgcattagttagttggtgaggtaagggcccaccaagacgatgatgcgtagccggcctgagagggtgaa

SEQ ID NO: 5538 - DNA, 301 bp, Unknown
  Ascusbbf_104C, encodes 16S rRNA
agagtttgatcctggctcaggataaacgctggcggcgtgcctaatacatgcaagtcgaacgagggagacccagcttgctgggttgaccgagtggcgaacgggtgagtaatacataagcaacctgcccacggagaccgggataatctctggaaacggggactaaaaccggataggcagcaatgaggcatctcaatgctgttaaaggtgagagacactggtggatgggcttatggcgcattagttagttggtgaggtaacggcccaccaagacgatgatgcgtagccggcctgagagggtgaa

SEQ ID NO: 5539 - DNA, 300 bp, Unknown
  Ascusbbf_104D, encodes 16S rRNA
agagtttgatcatggctcgggataaacgctggcggcgtgcctaatacatgcaagtcgaacgagggagacccagcttgctgggttgaccgagtggcgaacgggtgagtaatacataagcaacctgcccacagagaccgggataatctctggaaacggggactaaaaccggataggcagcaatgaggcatctcaatgctgttaaaggtgagagacactggtggatgggcttatggcgcattagttagttggtgaggtaacggcccaccaagacgatgatgcgtagccggcctgagagggtga

SEQ ID NO: 5540 - DNA, 300 bp, Unknown
  Ascusbbf_104E, encodes 16S rRNA
agagtttgatcctggctcaggataaacgctggcggcgtgcctaatacatgcaagtcgaacgaggaagacccagcttgctgggttgaccgagtggcgaacgggtgagtaatacataagcaacctgcccacggagaccgggataatctctggaaacggggactaaaaccggataggcagcaatgaggcatctcaatgctgttaaaggtgagagacactggtggatgggcttatggcgcattagttagttggtgaggtaagggcccaccaagacgatgatgcgtagccggcctgagagggtga

SEQ ID NO: 5541 - DNA, 300 bp, Unknown
  Ascusbbf_104F, encodes 16S rRNA
agagtttgatcatggctcaggataaacgctggcggcgtgcctaatacatgcaagtcgaacgaggaagacccagcttgctgggttgaccgagtggcgaacgggtgagtaatacataagcaacctgcccacggagaccgggataatctctggaaacggggactaaaaccggataggcagcaatgaggcatctcaatgctgttaaaggtgagagacactggtggatgggcttatggcgcattagttagttggtgaggtaacggcccaccaaggcgacgatcagtagccggtctgagaggatga

SEQ ID NO: 5542 - DNA, 301 bp, Unknown
  Ascusbbf_104G, encodes 16S rRNA
agagtttgatcatggctcaggataaacgctggcggcgtgcctaatacatgcaagtcgaacgagggagacccagcttgctgggttgaccgagtggcgaacgggtgagtaatacataagcaacctgcccacggagaccgggataatctctggaaacggggactaaaaccggataggcagcaatgaggcatctcaatgctgttaaaggtgagagacactggtggatgggcttatggcgcattagttagttggtgaggtaacggcccaccaagacgatgatgcgtagccggcctgagagggtgaa

SEQ ID NO: 5543 - DNA, 300 bp, Unknown
  Ascusbbf_104H, encodes 16S rRNA
agagtttgatcatggctcaggataaacgctggcggcgtgcctaatacatgcaagtcgaacgagggagacccagcttgctgggttgaccgagtggcgaacgggtgagtaatacataagcaacctgcccacagagaccgggataatctctggaaacggggactaaaaccggataggcagcaatgaggcatctcaatgctgttaaaggtgagagacactggtggatgggcttatggcgcattagttagttggtgaggtaacggcccaccaagacgatgatgcgtagccggcctgagagggtga

SEQ ID NO: 5544 - DNA, 300 bp, Unknown
  Ascusbbf_104I, encodes 16S rRNA
agagtttgatcatggctcaggataaacgctggcggcgtgcctaatacatgcaagtcgaacgaggaagacccagcttgctgggttgaccgagtggcgaacgggtgagtaatacataagcaacctgcccacggagaccgggataatctctggaaacggggactaaaaccggataggcagcaatgaggcatctcaatgctgttaaaggtgagagacactggtggatgggcttatggcgcattagctagttggtgaggtaacggcccaccaaggcgacgatcagtagccggactgagaggttga

SEQ ID NO: 5545 - DNA, 301 bp, Unknown
  Ascusbbf_148A, encodes 16S rRNA
agagtttgatcctggctcaggatgaacgctggcggcgtgcctaacacatgcaagtcgaacgagcgagagatgaaacctagtgattctcgagcgagtggcggacgggtgagtaacgcgtgggtaacctgccttacagagggggataacagtttgaaaagactgctaataccgcataagcacacagtaccgcatggtacagggtgaaaagatttatcactgtaagatggacccgcgtctgattagccagttggcagggtaacggcctaccaaagcgacgatcagtagccgacctgagagggtg

SEQ ID NO: 5546 - DNA, 301 bp, Unknown
  Ascusbbf_148B, encodes 16S rRNA
agagtttgatcctggctcaggatgaacgctggcggcgtgcctaacacatgcaagtcgaacgagcgagagatgaaacctagtgattctcaagcgagtggcggacgggtgagtaacgcgtgggtaacctgccttacagagggggataacagtctgaaaagactgctaataccgcataagcacacagtaccgcatggtacagggtgaaaagatttatcactgtaagatggacccgcgtctgattagccagttggcagggtaacggcctaccaaagcgacgatcagtagccgacctgagagggtg

SEQ ID NO: 5547 - DNA, 301 bp, Unknown
  Ascusbbf_148C, encodes 16S rRNA
agagtttgatcatggctcaggatgaacgctggcggcgtgcctaacacatgcaagtcgaacgagcgagagatgaaacctagtgattctcaagcgagtggcggacgggtgagtaacgcgtgggtaacctgccttacagagggggataacagtctgaaaagactgctaataccgcataagcacacagtaccgcatggtacagggtgaaaagatttatcactgtaagatggacccgcgtctgattagccagttggcagggtaacggcctaccaaagcgacgatcagtagccgacctgagagggtg

SEQ ID NO: 5548 - DNA, 301 bp, Unknown
  Ascusbbf_148D, encodes 16S rRNA
agagtttgatcctggctcaggatgaacgctggcggcgtgcctaacacatgcaagtcgaacgagcgagagatgaaacctagtgaatctcgagcgagtggcggacgggtgagtaacgcgtgggtaacctgccttacagagggggataacagtttgaaaagactgctaataccgcataagcacacagtaccgcatggtacagggtgaaaagatttatcactgtaagatggacccgcgtctgattagccagttggcagggtaacggcctaccaaagcgacgatcagtagccgacctgagagggtg

SEQ ID NO: 5549 - DNA, 301 bp, Unknown
  Ascusbbf_148E, encodes 16S rRNA
agagtttgatcatggctcaggatgaacgctggcggcgtgcctaacacatgcaagtcgaacgagcgaggtatgaaacctagtgattaccgagcgagtggcggacgggtgagtaacgcgtgggtaacctgccttacagagggggataacagtttgaaaagactgctaataccgcataagcacacagtaccgcatggtacagggtgaaaagatttatcactgtaagatggacccgcgtctgattagccagttggcagggtaacggcctaccaaagcgacgatcagtagccgacctgagagggtg

SEQ ID NO: 5550 - DNA, 300 bp, Unknown
  Ascusbbf_148F, encodes 16S rRNA
agagtttgatcctggctcagattgaacgctggcggcaggcttaatacatgcaagtcgaacggtaacagcaggaagcttgcttcctggctgacgagtggcggacgggtgagtaatacctggggagctgcctgaatgagggggacaacacctggaaacgggtgctaataccgcgtaagccctgagggggaaaggctgggcaaccagtcgcattcagatgcgcccaggtgggattagctagttggtggggtaacggcctaccaaggcgacgatctctagctggtctgagaggatgatcagcca

SEQ ID NO: 5551 - DNA, 301 bp, Unknown
  Ascusbbf_148G, encodes 16S rRNA
agagtttgatcatggctcaggatgaacgctggcggcgtgcctaacacatgcaagtcgaacgagcgagagatgaaacctagtgaatttcgagcgagtggcggacgggtgagtaacgcgtgggtaacctgccttacagagggggataacagtttgaaaagactgctaataccgcataagcacacagtaccgcatggtacagggtgaaaagatttatcactgtaagatggacccgcgtctgattagccagttggcagggtaacggcctaccaaagcgacgatcagtagccgacctgagagggtg

SEQ ID NO: 5552 - DNA, 301 bp, Unknown
  Ascusbbf_148H, encodes 16S rRNA
agagtttgatcatggctcaggatgaacgctggcggcgtgcctaacacatgcaagtcgaacgagcgagagatgaaacctagtgattcttgagcgagtggcggacgggtgagtaacgcgtgggtaacctgccttacagagggggataacagtttgaaaagactgctaataccgcataagcacacagtaccgcatggtacagggtgaaaagatttatcactgtaagatggacccgcgtctgattagccagttggcagggtaacggcctaccaaagcgacgatcagtagccgacctgagagggtg

SEQ ID NO: 5553 - DNA, 225 bp, Unknown
  Ascusbbf_944A, encodes 16S rRNA
agagtttgatcatggctcaggatgaacgctagctacaggcttaacacatgcaagtcgaggggtaacatgaagaaagcttgctttctttgatgacgaccggcgcacgggtgagtatcgcgtatccaacctgcccataagtagggaatagccttgcgaaagtaagattaatgccctatggtttccattaaagacatctgagatggaataaagatttatcgcttatgg

SEQ ID NO: 5554 - DNA, 300 bp, Unknown
  Ascusbbf_944B, encodes 16S rRNA
agagtttgatcctggctcaggatgaacgctagctacaggcttaacacatgcaagtcgaggggtaacatgaagaaagcttgctttctttgatgacgaccggcgcacgggtgagtatcgcgtatccaacctgcccataagtagggaatagccttgcgaaagtaagattaatgccctatggtttccgttaaagacatctgagatggaataaagatttatcgcttatggatggggatgcgtctgattaggtagtaggcggggtaacggcccacctagccgacgatcagtaggggttctgagagg

SEQ ID NO: 5555 - DNA, 300 bp, Unknown
  Ascusbbf_944C, encodes 16S rRNA
agagtttgatcctggctcaggatgaacgctagctacaggcttaacacatgcaagtcgaggggtaacatgaagaaagcttgctttctttgatgacgaccggcgcacgggtgagtatcgcgtatccaacctgcccataagtagggaatagccttgcgaaagtaagattaatgccctatggtttccattaaagacatctgagatggaataaagatttatcgcttatggatggggatgcgtctgattaggtagtaggcggggtaacggcccacctagccgacgatcagtaggggttctgagagg

SEQ ID NO: 5556 - DNA, 300 bp, Unknown
  Ascusbbf_944D, encodes 16S rRNA
agagtttgatcatggctcaggatgaacgctagctacaggcttaacacatgcaagtcgaggggtaacatgaagaaagcttgctttctttgatgacgaccggcgcacgggtgagtatcgcgtatccaacctgcccataagtagggaatagccttgcgaaagtaagattaatgccctatggtttccgttaaagacatctgagatggaataaagatttatcgcttatggatggggatgcgtctgattaggtagtaggcggggtaacggcccacctagccgacgatcagtaggggttctgagagg

SEQ ID NO: 5557 - DNA, 300 bp, Unknown
  Ascusbbf_944E, encodes 16S rRNA
agagtttgatcctggctcaggatgaacgctagctacaggcttaacacatgcaagtcgaggggtaacatgaagaaagcttgctttctttgatgacgaccggcgcacgggtgagtatcgcgtatccaacctgcccataagtagggaatagccttgcgaaagtaagattaatgccctatggtttccattgaagacatctgagatggaataaagatttatcgcttatggatggggatgcgtctgattaggtagtaggcggggtaacggcccacctagccgacgatcagtaggggttctgagagg

SEQ ID NO: 5558 - DNA, 300 bp, Unknown
  Ascusbbf_944F, encodes 16S rRNA
agagtttgatcctggctcaggatgaacgctagctacaggcttaacacatgcaagtcgaggggtaacatgaagaaagcttgctttctttgatgacgaccggcgcacgggtgagtatcgcgtatccaacctgcccataagtagggaatagccttgcgaaagtaagattaatgccctatggtttccgtcgtagacatcttagatggaataaagatttatcgcttatggatggggatgcgtctgattaggtagtaggcggggtagcggcccacctagccgacgatcagtaggggttctgagagg

SEQ ID NO: 5559 - DNA, 300 bp, Unknown
  Ascusbbf_944G, encodes 16S rRNA
agagtttgatcatggctcaggatgaacgctagctacaggcttaacacatgcaagtcgaggggtaacatgaagaaagtttgctttctttgatgacgaccggcgcacgggtgagtatcgcgtatccaacctgcccataagtagggaatagccttgcgaaagtaagattaatgccctatggcttccattgaaggcatctgagatggaataaagatttatcgcttatggatggggatgcgtctgattaggtagtaggcggggtaacggcccacctagccgacgatcagtaggggttctgagagg

SEQ ID NO: 5560 - DNA, 297 bp, Unknown
  Ascusbbf_23033A, encodes 16S rRNA
agagtttgatcctggctcaggatgaacgctggcggcgtgcttaatacatgcaagtcgaacggatgagatcaggcagcttgctgtctgattgatttagtggcgaacgggtgagtaatacgtaggcaacctgccccaaagcgggggatagcagttggaaacgactattaataccgcataggtaatcttgaggcatcttgagattattaaaggtgcgtttgcaccgctgtgggatgggcttacgctgtattagcttgttggtgaggtaacggcccaccaaggcgatgatacatagccggt

SEQ ID NO: 5561 - DNA, 297 bp, Unknown
  Ascusbbf_23033B, encodes 16S rRNA
agagtttgatcatggctcaggatgaacgctggcggcgtgcttaatacatgcaagtcgaacggatgagatcagacagcttgctgcctgattgattcagtggcgaacgggtgagtaatacgtaggcaacctgccccaaagcgggggatagcagttggaaacgactattaataccgcataggtaatcttgaggcatcttgagattattaaaggtgcgtttgcaccgctgtgggatgggcttacgctgtattagcttgttggtgaggtaacggcccaccaaggcgatgatacatagccggt

SEQ ID NO: 5562 - DNA, 297 bp, Unknown
  Ascusbbf_23033C, encodes 16S rRNA
agagtttgatcctggctcaggatgaacgctggcggcgtgcttaatacatgcaagtcgaacggatgagatcagacagcttgctgcctgattgattcagtggcgaacgggtgagtaatacgtaggcaacctgccccaaagcgggggatagcagttggaaacgactattaataccgcataggtaatcttgaggcatcttgagattattaaaggtgcgtttgcaccgctgtgggatgggcttacgctgtattagcttgttggtgaggtaacggcccaccaaggcgatgatacatagccggt

SEQ ID NO: 5563 - DNA, 297 bp, Unknown
  Ascusbbf_23033D, encodes 16S rRNA
agagtttgatcatggctcaggatgaacgctggcggcgtgcttaatacatgcaagtcgaacggatgagatcaggcagcttgctgtctgattgatttagtggcgaacgggtgagtaatacgtaggcaacctgccccaaagcgggggatagcagttggaaacgactattaataccgcataggtaatcttgaggcatcttgagattattaaaggtgcgtttgcaccgctgtgggatgggcttacgctgtattagcttgttggtgaggtaacggcccaccaaggcgatgatacatagccggt

SEQ ID NO: 5564 - DNA, 225 bp, Unknown
  Ascusbbf_2600A, encodes 16S rRNA
agagtttgatcatggctcagattgaacgctggcggcatgccttacacatgcaagtcgaacggcagcgggggagcttgctcctgccggcgagtggcgaacgggtgagtaatgcatcggaacgtgtcctgtcgtgggggataactggccgaaaggtcagctaataccgcatgagacccgagggtgaaagcgggggatcgcaagacctcgcgcgactggagcggccga

SEQ ID NO: 5565 - DNA, 299 bp, Unknown
  Ascusbbf_2600B, encodes 16S rRNA
agagtttgatcctggctcagattgaacgctggcggcatgccttacacatgcaagtcgaacggcagcgggggagcttgctcctgccggcgagtggcgaacgggtgagtaatgcatcggaacgtgtcctgtcgtgggggataactggccgaaaggtcagctaataccgcatgagacccgagggtgaaagcgggggatcgcaagacctcgcgcgactggagcggccgatgtctgattagctggttggtggggtaaaagcttaccaaggcgacgatcagtagctggtctgagaggatgatcag

SEQ ID NO: 5566 - DNA, 299 bp, Unknown
  Ascusbbf_2600C, encodes 16S rRNA
agagtttgatcatggctcagattgaacgctggcggcatgccttacacatgcaagtcgaacggcagcgggggagcttgctcctgccggcgagtggcgaacgggtgagtaatgcatcggaacgtgtcctgtcgtgggggataactggccgaaaggtcagctaataccgcatgagacccgagggtgaaagcgggggatcgcaagacctcgcgcgactggagcggccgatgtctgattagctggttggtggggtaaaagcttaccaaggcgacgatcagtagctggtctgagaggatgatcag

SEQ ID NO: 5567 - DNA, 299 bp, Unknown
  Ascusbbf_2600D, encodes 16S rRNA
agagtttgatcatggctcagattgaacgctggcggcatgccttacacatgcaagtcgaacggcagcgggggagcttgctcctgccggcgagtggcgaacgggtgagtaatgcatcggaacgtgtcctgtcgtgggggataactgaccgaaaggtcagctaataccgcatgagacccgagggtgaaagcgggggatcgcaagacctcgcgcgactggagcggccgatgtctgattagctggttggtggggtaaaagcttaccaaagcgacgatcagtagctggtctgagaggatgatcag

SEQ ID NO: 5568 - DNA, 299 bp, Unknown
  Ascusbbf_2600E, encodes 16S rRNA
agagtttgatcctggctcagattgaacgctggcggcatgccttacacatgcaagtcgaacggcagcgggggagcttgctcctgccggcgagtggcgaacgggtgagtaatgcatcggaacgtgtcctgtcgtgggggataactgaccgaaaggtcagctaataccgcatgagacccgagggtgaaagcgggggatcgcaagacctcgcgcgactggagcggccgatgtctgattagctggttggtggggtaaaagcttaccaaagcgacgatcagtagctggtctgagaggatgatcag

SEQ ID NO: 5569 - DNA, 299 bp, Unknown
  Ascusbbf_2600F, encodes 16S rRNA
agagtttgatcatggctcaggacgaacgctggcggcatgccttacacatgtaagtcgaacggcagcgggggagcttgctcctgccggcgagtggcgaacgggtgagtaatgcatcggaacgtgtcctgtcgtgggggataactggccgaaaggtcagctaataccgcatgagacccgagggtgaaagcgggggatcgcaagacctcgcgcgactggagcggccgatgtctgattagctggttggtggggtaaaagcttaccaaggcgacgatcagtagctggtctgagaggatgatcag

SEQ ID NO: 5570 - DNA, 300 bp, Unknown
  Ascusbbf_2600G, encodes 16S rRNA
agatttgattatggctcagattgaacgctggcggcatgccttacacatgcaagtcgaacggcagcgggggagttgctcctgccggcgagtggcgaacgggtgagtaatgcatcggaacgtgtcctgtcgtgggggataactggccgaaaggtcagctaataccgcatgagacccgagggtgaaagcgggggatcgcaagacctcgcgcgactggagcggccgatgtctgattagctggttggtggggtaaaagcttaccaaggcgacgatcagtagctggtctgagaggatgatcagcca

SEQ ID NO: 5571 - DNA, 301 bp, Unknown
  Ascusbbf_2600H, encodes 16S rRNA
agagtttgatcctggctcagattgaacgctggcggcaggcctaatacatgcaagtcgaacggtaacataaaagaagcttgcttcttttgatgacgagtggcggacgggtgagtaatatttgggaaactacctgatagagggggacaacagttggaaacgactgctaataccgcataaagcctaagggtgaaagcagcaatgcgctatcagatgtgcccaaacgggattagctagtaggtgaggtaaaggctcacctaggcgacgatctctagctggtctgagaggatgatcagccacattg

SEQ ID NO: 5572 - DNA, 300 bp, Unknown
  Ascusbbf_8118A, encodes 16S rRNA
agagtttgatcctggctcaggatgaacgctagctacaggcttaacacatgcaagtcgaggggcatcatgtgaggacttcggtcctttcgatggcgaccggcgaatgggtgagtaacacgtatccgacctgccctgtactggaggatagcctcccgaaagggaaattaatactccatgtgtcatgttgcttcatggtggcatgatgaaagatttatcggtacaggatggggatgcgttccattagccagccggcggggtaacggcccaccggggcgacgatggataggggttctgagagga

SEQ ID NO: 5573 - DNA, 300 bp, Unknown
  Ascusbbf_8118B, encodes 16S rRNA
agagtttgatcatggctcaggatgaacgctagctacaggcttaacacatgcaagtcgaggggcatcatgtgaggacttcggtcctttcgatggcgaccggcgaatgggtgagtaacacgtatccgacctgccctgtactggaggatagcctcccgaaagggaaattaatactccatgtgtcatgttgcttcatggtggcatgatgaaagatttatcggtacaggatggggatgcgttccattagccagccggcggggtaacggcccaccggggcgacgatggataggggttctgagagga

SEQ ID NO: 5574 - DNA, 300 bp, Unknown
  Ascusbbf_201A, encodes 16S rRNA
agagtttgatcctggctcaggatgaacgctagctacaggcttaacacatgcaagtcgaggggcagcatatagatagcttgctatttatgatggcgaccggcgcacgggtgagtaacgcgtatccaaccttccctatactagagaatagcccggcgaaagtcggattaatgctctatgttcttctttgatggcatctgacgagaagcaaaggtttaccggtataggatggggatgcgtctgattaggttgttggcggggtaacggcccaccaagcctacgatcagtaggggttctgagagg

SEQ ID NO: 5575 - DNA, 301 bp, Unknown
  Ascusbbf_201J, encodes 16S rRNA
agagtttgatcatggctcaggatgaacgctagctacaggcttaacacatgcaagtcgaggggcagcatatagatagcttgctatttatgatggcgaccggcgcacgggtgagtaacgcgtatccaaccttccctatactagagaatagcccggcgaaagtcggattaatgctctatgttcttctttgatggcgtctgacgagaagcaaaggtttaccggtataggatggggatgcgtctgattaggttgttggcggggtaacggcccaccaagcctacgatcagtaggggttctgagagga

SEQ ID NO: 5576 - DNA, 301 bp, Unknown
  Ascusbbf_201K, encodes 16S rRNA
agagtttgatcatggctcaggatgaacgctagctacaggcttaacacatgcaagtcgaggggcagcatatagatagcttgctatttatgatggcgaccggcgcacgggtgagtaacgcgtatccaaccttccctatactagagaatagcccggcgaaagtcggattaatgctctatgttcttctttgatggcatctgacgagaagcaaaggtttaccggtataggatggggatgcgtctgattaggttgttggcggggtaacggcccaccaagcctacgatcagtaggggttctgagagga

SEQ ID NO: 5577 - DNA, 301 bp, Unknown
  Ascusbbf_201L, encodes 16S rRNA
agagtttgatcctggctcaggacgaacgctggcggcgtgcttaacacatgcaagtcgaacgagacgatttagaagcttgcttttattgagtcgagtggcaaacgggtgagtaacgcgtagacaacctgccgcaaagatggggacaacagtccgaaaggactgctaataccgaatgttgtatctcctccgcatgaaagagatattaaagatggcctctacttgtaagctatcgctttgcgatgggtctgcgtctgattagctagttggtggggcaacggcctaccaaggcaacgatcagtag

SEQ ID NO: 5578 - DNA, 300 bp, Unknown
  Ascusbbf_10712A, encodes 16S rRNA
agagtttgatcctggctcaggacgaacgctggcggcgtgcttaacacatgcaagtcgaacgagaagagatgagaagcttgcttcttattgattcgagtggcaaacgggtgagtaacgcgtaagcaacctgcccttcagatggggacaacagctggaaacggctgctaataccgaatacgttctttctgccgcatgacagagggaagaaagggaggctcttcggagctttcgctggaggagggacttgcgtctgattagctagttggaggggtaacggcccaccaaggcgacgatcagtag

SEQ ID NO: 5579 - DNA, 225 bp, Unknown
  Ascusbbf_10712B, encodes 16S rRNA
agagtttgatcatggctcaggacgaacgctggcggcgtgcttaacacatgcaagtcgaacgagaagagatgagaagcttgcttcttattgattcgagtggcaaacgggtgagtaacgcgtaagcaacctgcccttcagatggggacaacagctggaaacggctgctaataccgaatacgttctttttgtcgcatggcagagggaagaaagggaggctcttcggag

SEQ ID NO: 5580 - DNA, 300 bp, Unknown
  Ascusbbf_10712C, encodes 16S rRNA
agagtttgatcctggctcaggacgaacgctggcggcgtgcttaacacatgcaagtcgaacgagaagagatgagaagcttgcttcttattgattcgagtgacaaacgggtgagtaacgcgtaagcaacctgcccttcagatggggacaacagctggaaacggctgctaataccgaatacgttctttttgtcacatggcagagagaagaaagggaggctcttcggagctttcgctgaaggaggggcttgcgtctgattagctagttggaggggtaacggcccaccaaggcgacgatcagtag

SEQ ID NO: 5581 - DNA, 300 bp, Unknown
  Ascusbbf_10712D, encodes 16S rRNA
agagtttgatcctggctcaggatgaacgccggcggtgtgcctaatacatgcaagtcgaacgagaagagatgagaagcttgcttcttatcgattcgagtggcaaacgggtgagtaacgcgtaagcaacctgcccttcagatggggacaacagctggaaacggctgctaataccgaatacgttctttttgtcgcatggcagagggaagaaagggaggctcttcggagctttcgctgaaggaggggcttgcgtctgattagctagttggaggggtaacggcccaccaaggcgacgatcagtag

SEQ ID NO: 5582 - DNA, 300 bp, Unknown
  Ascusbbf_10712E, encodes 16S rRNA
agagtttgatcatggctcaggacgaacgctggcggcgtgcttaacacatgcaagtcgaacgagaagagatgagaagcttgcttcttattgattcgagtggcaaacgggtgagtaacgcgtaagcaacctgcccttcagatggggacaacagctggaaacggctgctaataccgaatacgttctttttgtcgcatggcagagggaagaaagggaggctcttcggagctttcgctgaaggaggggcttgcgtctgattagctagttggaggggtaacggcccaccaaggcgacgatcagtag

SEQ ID NO: 5583 - DNA, 300 bp, Unknown
  Ascusbbf_10712F, encodes 16S rRNA
agagtttgatcatggctcaggacgaacgctggcggcgtgcttaacacatgcaagtcgaacgagaagagatgagaagcttgcttcttattgattcgagtggcaaacgggtgagtaacgcgtaagcaacctgcccttcagatggggacaacagctggaaacggctgctaataccgaatatgttctttttgtcgcatggcagagggaagaaagggaggctcttcggagctttcgctgaaggaggggcttgcgtctgattagctagttggaggggtaacggcccaccaaggcgacgatcagtag

SEQ ID NO: 5584 - DNA, 298 bp, Unknown
  Ascusbbf_10712G, encodes 16S rRNA
agagtttgatcctggctcaggacgaacgctggcggcgtgcttaacacatgcaagtcgaacgagaagagatgagaagcttgcttcttattgattcgagtggcaaacgggtgagtaacgcgtaagcaacctgcccttcagatggggacaacagctggaaacggctgctaataccgaatacgttctttttgtcgcatggcagagagaagaaagggaggctcttcggagctttcgctgaaggaggggcttgcgtctgattagctagttggaggggtaacggcccaccaaggcgacgatcagt

SEQ ID NO: 5585 - DNA, 300 bp, Unknown
  Ascusbbf_10712H, encodes 16S rRNA
agagtttgatcctggctcaggacgaacgctggcggcgtgcttaacacatgcaagtcgaacgagaagagatgagaagcttgcttcttatcaattcgagtggcaaacgggtgagtaacgcgtaagcaacctgcccttcagatggggacaacagctggaaacggctgctaataccgaatacgttctttttgtcgcatggcagagggaagaaagggaggctcttcggagctttcgctgaaggaggggcttgcgtctgattagctagttggaggggtaacggcccaccaaggcgacgatcagtag

SEQ ID NO: 5586 - DNA, 300 bp, Unknown
  Ascusbbf_10712I, encodes 16S rRNA
agagtttgatcatggctcaggacgaacgctggcggcgtgcttaacacatgcaagtcgaacgagaagagatgagaagcttgcttcttattgattcgagtggcaaacgggtgagtaacgcgtaagcaacctgcccttcagatggggacaacagctggaaacggctgctaataccgaatacgttctttctgccgcatgacagagggaagaaagggaggctcttcggagctttcgctggaggagggacttgcgtctgattagctagttggaggggtaacggcccaccaaggcgacgatcagtag

SEQ ID NO: 5587 - DNA, 225 bp, Unknown
  Ascusbbf_6012A, encodes 16S rRNA
agagtttgatcatggctcagattgaacgctggcggcaggcctaatacatgcaagtcgaacggcagcagggggagtgcttgcactccccgctggcgagtggcggacgggtgagtagtgcctgggaagctgcctggcagagggggacaacagctggaaacggctgctgataccgcatattaccccgagggggaaaggagagatccgctgccggatgcgcccaggcgg

SEQ ID NO: 5588 - DNA, 301 bp, Unknown
  Ascusbbf_6012B, encodes 16S rRNA
agagtttgatcatggctcagattgaacgctggcggcaggcctaatacatgcaagtcgaacggcagcagggggagtgcttgcactccccgctggcgagtggcggacgggtgagtagtgcctgggaagctgcctggcagagggggacaacagctggaaacggctgctgataccgcatattaccccgagggggaaaggagagatccgctgccggatgcgcccaggcgggattagctggttggcggggcaaaggcccaccaaggcgacgatccctagctggtctgagaggatgatcagccacatt

SEQ ID NO: 5589 - DNA, 301 bp, Unknown
  Ascusbbf_6012C, encodes 16S rRNA
agagtttgatcatggctcagattgaacgctggcggcaggcctaatacatgcaagtcgaacggcagcagggggagtgcttgcacttcccgctggcgagtggcggacgggtgagtagtgcctgggaagctgcctggcagagggggacaacagctggaaacggctgctgataccgcatattaccccgagggggaaaggagagatccgctgccggatgcgcccaggcgggattagctagttggcggggcaaaggcccaccaaggcgacgatccctagctggtctgagaggatgatcagccacatt

SEQ ID NO: 5590 - DNA, 301 bp, Unknown
  Ascusbbf_6012D, encodes 16S rRNA
agagtttgatcctggctcagattgaacgctggcggcaggcctaatacatgcaagtcgaacggcagcagggggagtgcttgcacttcccgctggcgagtggcggacgggtgagtagtgcctgggaagctgcctggcagagggggacaacagctggaaacggctgctgataccgcatattaccccgagggggaaaggagagatccgctgccggatgcgcccaggcgggattagctagttggcggggcaaaggcccaccaaggcgacgatccctagctggtctgagaggatgatcagccacatt

SEQ ID NO: 5591 - DNA, 301 bp, Unknown
  Ascusbbf_6012E, encodes 16S rRNA
agagtttgatcctggctcagattgaacgctggcggcaggcctaatacatgcaagtcgaacggcagcagggggagtgcttgcactccccgctggcgagtggcggacgggtgagtagtgcctgggaagctgcctggcagagggggacaacagctggaaacggctgctgataccgcatattaccccgagggggaaaggagagatccgctgccggatgcgcccaggcggggttagctggttggcggggcaaaggcccaccaaggcgacggtccctagctggtctgagaggatgatcagccacatt

SEQ ID NO: 5592 - DNA, 300 bp, Unknown
  Ascusbbf_2297A, encodes 16S rRNA
agagtttgatcctggctcagaacgaacgctggcggcgcatcttaagcatgcaagtcgagcggtaagttggaagcttgcttctaacctagagcggcggactggtgagtaacgcgtgggtgacgtacctctgtgacggggacagctcctagaaataggagataataccggatacgctgtgtgctgtcagagggcacacaggaaaggatcttttgattcgcacagagagcggcccgcgtactattagctggttggtgaggtaacggcccaccaaggcgacgatagttacccggcctaagaggg

SEQ ID NO: 5593 - DNA, 300 bp, Unknown
  Ascusbbf_2297B, encodes 16S rRNA
agagtttgatcctggctcaggatgaacgctagctacaggcttaacacatgcaagtcgaggggcagcaggattctagcttgctagaattgctggcgaccggcgcacgggtgagtaacgcgtatccaacctggcccttagtagaggatagcccggcgaaagtcggattaatactctatgttctccaatgcgggcatctaatttggagcaaagatttatcgctatgggatggggatgcgtctgattagcttgtcggcggggtaacggcccaccgaggcaacgatcagtaggggttctgagagg

SEQ ID NO: 5594 - DNA, 301 bp, Unknown
  Ascusbbf_2297C, encodes 16S rRNA
agagtttgatcctggctcagaacgaacgctggcggcgcgtcttaagcatgcaagtcgagcggtaagttggaagcttgcttctaacctagagcggcggactggtgagtaacgcgtgggtgacgtacctctgtgacggggacagctcctagaaataggagataataccggatacgctgcatgttgtcagaggacatgcaggaaaggatcttttgattcgcacagagagcggcccgcgtactattagctagttggtgaggtaacggcccaccaaggcgacgatagttacccggcctaagagggg

SEQ ID NO: 5595 - DNA, 301 bp, Unknown
  Ascusbbf_2297D, encodes 16S rRNA
agagtttgatcctggctcagaacgaacgctggcggcgcgtcttaagcatgcaagtcgagcggtaagtcgggagcttgctcctgacctagagcggcggactggtgagtaacgcgtgggtgacgtacctctgtgacggggacagctcctagaaataggagataataccggatacgctgcatgttgtcagaggacatgcaggaaaggatcttttgattcgcacagagagcggcccgcgtactattagctggttggtgaggtaacggcccaccaaggcgacgatagttacccggcctaagagggg

SEQ ID NO: 5596 - DNA, 301 bp, Unknown
  Ascusbbf_2297E, encodes 16S rRNA
agagtttgatcctggctcagaacgaacgctggcggcgcgtcttaagcatgcaagtcgagcggtaagtcgggagcttgctcctgacctagagcggcggactggtgagtaacgcgtgggtgacgtacctctgtgacggggacagctcctagaaataggagataataccggatacgctgcatgttgtcagaggacatgcaggaaaggatcttttgattcgcacagagagcggcccgcgtactattagctagttggtgaggtaacggcccaccaaggcgacgatagttacccggcctaagagggg

SEQ ID NO: 5597 - DNA, 301 bp, Unknown
  Ascusbbf_2297F, encodes 16S rRNA
agagtttgatcatggctcagaacgaacgctggcggcgcgtcttaagcatgcaagtcgagcggtaagatggaagcttgcttctatcctagagcggcggactggtgagtaacgcgtgggtgacgtacctttgtgacggggacagctcctagaaataggagataataccggatacgctgcatgttgtcagaggacatgcaggaaaggatcttttgattcgcacagagagcggcccgcgtactattagctagttggtggggtaacggcccaccaaggcgacgatagttacccggcctaagagggg

SEQ ID NO: 5598 - DNA, 301 bp, Unknown
  Ascusbbf_2297G, encodes 16S rRNA
agagtttgatcatggctcagaacgaacgctggcggcgcgtcttaagcatgcaagtcgagcggtaagttggaagcttgcttctaacctagagcggcggactggtgagtaacgcgtgggtgacgtacctctgtgacggggacagctcctagaaataggagataataccggatacgctgcatgttgtcagaggacatgcaggaaaggatcttttgattcgcacagagagcggcccgcgtactattagctagttggtgaggtaacggcccaccaaggcgacgatagttacccggcctaagagggg

SEQ ID NO: 5599 - DNA, 301 bp, Unknown
  Ascusbbf_2297H, encodes 16S rRNA
agagtttgatcctggctcagaacgaacgctggcggcgcgtcttaagcatgcaagtcgagcggtaagtcgggagcttgctcctgacctagagcggcggactggtgagtaacgcgtgggtgacgtacctctgtgacggggacagctcctagaaataggagataataccggatacgctgcatgttgtcagaggacatgcaggaaaggatcttttgattcgcacagagagcggcccgcgtactattagctggttggtgaggtaacggcccaccaaggcgacgataggtacccggcctaagagggg

SEQ ID NO: 5600 - DNA, 298 bp, Unknown; identical to SEQ ID NO: 5480
  Ascusbbf_873A, encodes 16S rRNA

SEQ ID NO: 5601 - DNA, 299 bp, Unknown
  Ascusbbf_873B, encodes 16S rRNA
agagtttgatcctggctcaggacgaacgctggcggcgtgcttaacacatgcaagtcgaacgagaatctgtggatcgaggattcgtccaagtgaagcagaggacagtggcggacgggtgagtaacgcgtgaggaacctgcctttcagagggggacaacagttggaaacgactgctaataccgcatgatacatttgggtggcatcatctgaatgtcaaagatttatcgctgaaagatggcctcgcgtctgattagctagttggtgaggtaacggcccaccaaggcgacgatcagtagccgg

SEQ ID NO: 5602 - DNA, 300 bp, Unknown
  Ascusbbf_873C, encodes 16S rRNA
agagtttgatcatggctcaggacgaacgctggcggcgtgcttaacacatgcaagtcgaacgagaatctgtggatcgaggattcgtccaagtgaagcagaggacagtggcggacgggtgagtaacgcgtgaggaacctgcctttcagagggggacaacagttggaaacgactgctaataccgcatgacacattcgagcggcatcgcttgaatgtcaaagatttatcgctgaaagatggcctcgcgtctgattagctagttggtgaggtaacggcccaccaaggcgacgatcagtagccgga

SEQ ID NO: 5603 - DNA, 300 bp, Unknown
  Ascusbbf_873D, encodes 16S rRNA
agagtttgatcctggctcaggacgaacgctggcggcgtgcttaacacatgcaagtcgaacgagaatctgtggatcgaggattcgtccaagtgaagcagaggacagtggcggacgggtgagtaacgcgtgaggaacctgcctttcagagggggacaacagttgggaacgactgctaataccgcatgatacatttgggtggcatcatctgaatgtcaaagatttatcgctgaaagatggcctcgcgtctgattagctagttggtgaggtaacggcccaccaaggcgacgatcagtagccggg

SEQ ID NO: 5604 - DNA, 300 bp, Unknown
  Ascusbbf_873E, encodes 16S rRNA
agagtttgatcctggctcaggacgaacgctggcggcgtgcttaacacatgcaagtcgaacgagaatctgtggatcgaggattcgtccaagtgaagcagaggacagtggcggacgggtgagtaacgcgtgaggaacctgcctttcagagggggacaacagttggaaacgactgctaataccgcatgacacattcgagcggcatcgcttgaatgtcaaagatttatcgctgaaagatggcctcgcgtctgattagctagttggtgaggtaacggcccaccaaggcgacgatcagtagccgga

SEQ ID NO: 5605 - DNA, 300 bp, Unknown
  Ascusbbf_873F, encodes 16S rRNA
agagtttgatcatggctcaggacgaacgctggcggcgtgcttaacacatgcaagtcgaacgagaatctgtggatcgaggattcgtccaagtgaagcagaggacagtggcggacgggtgagtaacgcgtgaggaacctgcctttcagagggggacaacagttggaaacgactgctaataccgcatgatacatttgggtggcatcatctgaatgtcaaagatttatcgctgaaagatggcctcgcgtctgattagctagttggtgaggtaacggcccaccaaggcgacgatcagtagccgga

SEQ ID NO: 5606 - DNA, 300 bp, Unknown
  Ascusbbf_873G, encodes 16S rRNA
agagtttgatcatggctcagagcgaacgctggcggcgtgcttaacacatgcaagtcgaacgagaatctgtggatcgaggattcgtccaagtgaagcagaggacagtggcggacgggtgagtaacgcgtgaggaacctgcctttcagagggggacaacagttggaaacgactgctaataccgcatgacacattcgagcggcatcgcttgaatgtcaaagatttatcgctgaaagatggcctcgcgtctgattagctagttggtgaggtaacggcccaccaaggcgacgatcagtagccgga

SEQ ID NO: 5607 - DNA, 300 bp, Unknown
  Ascusbbf_269A, encodes 16S rRNA
agagtttgatcctggctcaggacgaacgctggcggcgtgcttaacacatgcaagtcgaacggaaaggccccgctcgcggggtactcgagtggcgaacgggtgagtaacacgtgggtgatctgccctgcacttcgggataagcctgggaaactgggtctaataccggatatgacctccctttagtgtggggggtggaaagatttatcggtgcaggatgagcccgcggcctatcagcttgttggtggggtaatggcctaccaaggcgtcgacgggtagccggcctgagagggtggacggcca

SEQ ID NO: 5608 - DNA, 300 bp, Unknown
  Ascusbbf_269B, encodes 16S rRNA
agagtttgatcatggctcaggacgaacgctggcggcgtgcttaacacatgcaagtcgaacggaaaggccccgctcgcggggtactcgagtggcgaacgggtgagtaacacgtgggtgatctgccctgcacttcgggataagcctgggaaactgggtctaataccggataggaccctcctttagtgtggggggtggaaagtttttcggtgcaggatgagcccgcggcctatcagcttgttggtggggtaatggcctaccaaggcgtcgacgggtagccggcctgagagggtggacggccac

SEQ ID NO: 5609 - DNA, 300 bp, Unknown
  Ascusbbf_269C, encodes 16S rRNA
agagtttgatcatggctcaggacgaacgctggcggcgtgcttaacacatgcaagtcgaacggaaaggccccgctcgcggggtactcgagtggcgaacgggtgagtaacacgtgggtgatctgccctgcacttcgggataagcctgggaaactgggtctaataccggatatgacctccctttagtgtggggggtggaaagatttatcggtgcaggatgagcccgcggcctatcagcttgttggtggggtaatggcctaccaaggcgtcgacgggtagccggcctgagagggtggacggcca

SEQ ID NO: 5610 - DNA, 300 bp, Unknown
  Ascusbbf_269D, encodes 16S rRNA
agagtttgatcctggctcaggacgaacgctggcggcgtgcttaacacatgcaagtcgaacggaaaggccccgcttgcggggtactcgagtggcgaacgggtgagtaacacgtgggtgatctgccctgcacttcgggataagcctgggaaactgggtctaataccggatatgacctccctttagtgtggggggtggaaagatttatcggtgcaggatgagcccgcggcctatcagcttgttggtggggtaatggcctaccaaggcgtcgacgggtagccggcctgagagggtggacggcca

SEQ ID NO: 5611 - DNA, 300 bp, Unknown
  Ascusbbf_269E, encodes 16S rRNA
agagtttgatcatggctcaggacgaacgctggcggcgtgcttaacacatgcaagtcgaacggaaaggccccgcttgcggggtactcgagtggcgaacgggtgagtaacacgtgggtgatctgccctgcacttcgggataagcctgggaaactgggtctaataccggataggacccctctttagtgtggggggtggaaagttttttcggtgtgggatgagcccgcggcctatcagcttgttggtggggtaatggcctaccaaggcgtcgacgggtagccggcctgagagggtggacggcca

SEQ ID NO: 5612 - DNA, 298 bp, Unknown; identical to SEQ ID NO: 5480
  Ascusbbf_269F, encodes 16S rRNA

SEQ ID NO: 5613 - DNA, 298 bp, Unknown; identical to SEQ ID NO: 5480
  Ascusbbf_269G, encodes 16S rRNA

SEQ ID NO: 5614 - DNA, 300 bp, Unknown
  Ascusbbf_41015A, encodes 16S rRNA
agagtttgatcatggctcaggatgaacgctggcggcgtgcttaacacatgcaagtcgaacgattaacccatcttcggatggttataaagtggcgaacgggtgagtaacacgtgaccaacctgcctttcacattgggataactaagggaaactgtagctaataccaaatactccggcacctccgcatggtagtgccgggaaagctccggcggtgaaagatggggtcgcggcccattaggtagttggtggggtaacggcctaccaagcccgcgatgggtagccgggttgagagactgatcgg

SEQ ID NO: 5615 - DNA, 300 bp, Unknown
  Ascusbbf_41015B, encodes 16S rRNA
agagtttgatcctggctcaggatgaacgctggcggcgtgcttaacacatgcaagtcgaacgattaacccatcttcggatggttataaagtggcgaacgggtgagtaacacgtgaccaacctgcctttcacattgggataactaagggaaactgtagctaataccaaatactccggcacctccgcatggtagtgccgggaaagctccggcggtgaaagatggggtcgcggcccattaggtagttggtggggtaacggcctaccaagcccatgatgggtagccgggttgagagactgatcgg

SEQ ID NO: 5616 - DNA, 300 bp, Unknown
  Ascusbbf_41015C, encodes 16S rRNA
agagtttgatcctggctcaggatgaacgctggcggcgtgcttaacacatgcaagtcgaacgattaacccatcttcggatggttataaagtggcgaacgggtgagtaacacgtgactaacctgcctttcacattgggataactaccggaaacgatagctaataccaaatactccggcacttccgcatggtcgtgccgggaaagctccggcggtgaaagatggggtcgcggcccattaggtagttggtggggtaacggcctaccaagcccgcgatgggtagccgggttgagagactgatcgg

SEQ ID NO: 5617 - DNA, 300 bp, Unknown
  Ascusbbf_41015D, encodes 16S rRNA
agagtttgatcctggctcaggatgaacgctggcggcgtgcttaacacatgcaagtcgaacgattaacccatcttcggatggttataaagtggcgaacgggtgagtaacacgtgaccaacctgcctttcacattgggataactattggaaacgatagctaataccaaatactccggtacctccgcatggcggttccgggaaagctccggcggtgaaagatggggtcgcggcccattaggtagttggtggggtaacggcctaccaagcccgcgatgggtagccgggttgagagactgatcgg

SEQ ID NO: 5618 - DNA, 300 bp, Unknown
  Ascusbbf_41015E, encodes 16S rRNA
agagtttgatcatggctcaggatgaacgctggcggcgtgcttaacacatgcaagtcgaacgattaacccatcttcggatggttataaagtggcgaacgggtgagtaacacgtgaccaacctgcctttcacattgggataactattggaaacgatagctaataccaaatactccggtacctccgcatggcggttccgggaaagctccggcggtgaaagatggggtcgcggcccattaggtagttggtggggtaacggcctaccaagcccgcgatgggtagccgggttgagagactgatcgg

SEQ ID NO: 5619 - DNA, 300 bp, Unknown; identical to SEQ ID NO: 5618
  Ascusbbf_32877A, encodes 16S rRNA

SEQ ID NO: 5620 - DNA, 300 bp, Unknown
  Ascusbbf_57294A, encodes 16S rRNA
agagtttgatcatggctcaggatgaacgctggcggcgtgcttaacacatgcaagtcgagcgaagcacttaagtttgattcttcggatgaagacttttgtgactgagcggcggacgggtgagtaacgcgtgggtaacctgcctcatacagggggataacagctagaaatgactgctaataccgcataagaccacggtaccgcatggtacagtggtaaaaactccggtggtatgagatggacccgcgtctgattaggtagttggtggggtaacggcctaccaagccgacgatcagtagccga

SEQ ID NO: 5621 - DNA, 300 bp, Unknown
  Ascusbbf_57294B, encodes 16S rRNA
agagtttgatcctggctcaggatgaacgctggcggcgtgcttaacacatgcaagtcgagcgaagcacttaagtttgattcttcggatgaagacttttgtgactgagcggcggacgggtgagtaacgcgtgggtaacctgcctcatacagggggataacagttagaaatgactgctaataccgcataagaccacggtaccgcatggtacagtggtaaaaactccggtggtatgagatggacccgcgtctgattaggtagttggtggggtaacggcctaccaagccgacgatcagtagccga

SEQ ID NO: 5622 - DNA, 299 bp, Unknown
  Ascusbbf_57294C, encodes 16S rRNA
agagtttgatcatggctcaggatgaacgctggcggcgtgcttaacacatgcaagtcgagcgaagcacttaggtttgattcttcggatgaagacctttgtgactgagcagcggacgggtgagtaacgcgtgggtaacctgcctcatacagggggataacagttagaaatgactgctaataccgcataagaccacggtaccgcatggtacagtggtaaaaactccggtggtatgagatggacccgcgtctgattaggtagttggtggggtaacggcctaccaagccgacgatcagtagccg

SEQ ID NO: 5623 - DNA, 299 bp, Unknown
  Ascusbbf_27932A, encodes 16S rRNA
agagtttgatcctggctcaggatgaacgctggcggcgtgcctaacacatgcaagtcgaacgaagtttgtttctacccgacggattatcttcggataagaagtcatttgaaacgcttagtggcggacgggtgagtaacgcgtgggcaacctgccctgcacagggggatagcagttggaaacgactggtaataccgcatatattgcatttgccgcatgacagatgcaagaaaacgtttagtggtgcaggatgggcccgcgtccgattagttagttggtggggtaacggcctaccaagacga

SEQ ID NO: 5624 - DNA, 301 bp, Unknown
  Ascusbbf_27932B, encodes 16S rRNA
agagtttgatcatggctcaggatgaacgctggcggcgtgcctaacacatgcaagtcgaacgaagtttgtttctacccgacggattatcttcggataagaagtcatttgaaacgcttagtggcggacgggtgagtaacgcgtgggcaacctgccctgcacagggggatagcagttggaaacgactggtaataccgcatatattgcatttgccgcatgacagatgcaagaaaacgtttagtggtgcaggatgggcccgcgtccgattagttagttggtggggtaacggcctaccaagacgacg

SEQ ID NO: 5625 - DNA, 299 bp, Unknown
  Ascusbbf_27932C, encodes 16S rRNA
agagtttgatcctggctcaggatgaacgctggcggcgtgcctaacacatgcaagtcgaacgaagtttgtttctacccgacggattatcttcggataagaagtcatttgaaacgcttagtggcggacgggtgagtaacgcgtgggcaacctgccctgcacagggggatagcagttggaaacgactggtaataccgcatatattgcatatgccgcatgacagatgcaagaaaacgtttagtggtgcaggatgggcccgcgtccgattagttagttggtggggtaacggcctaccaagacga

SEQ ID NO: 5626 - DNA, 301 bp, Unknown
  Ascusbbf_22558A, encodes 16S rRNA
agagtttgatcctggctcaggacgaacgctggcggcgtgcttaacacatgcaagtcgaacggggcgaagaagagcttgctctttggagcctagtggcaaacgggtgagtaacgcgtaggcaacctgcccttcagatggggacaacacctcgaaaggggtgctaataccgaatgacgtatgctggtcgcatgaccggcataccaaaggccgggcaaccggtcactgaaggatgggcctgcgtctgattagctagttggtggggtaacggcccaccaaggcgacgatcagtagccggtctgag

SEQ ID NO: 5627 - DNA, 301 bp, Unknown
  Ascusbbf_22558B, encodes 16S rRNA
agagtttgatcatggctcaggatgaacgctggcggcgtgcttaacacatgcaagtcgaacggggcgaagaagagcttgctctttggagcctagtggcaaacgggtgagtaacgcgtaggcaacctgcccttcagatggggacaacacctcgaaaggggtgctaataccgaatgacgtatgctggtcgcatgactgacataccaaaggccgggcaaccggtcactgaaggatgggcctgcgtctgattagctagttggtggggtaacggcccaccaaggcgacgatcagtagccggtctgag

SEQ ID NO: 5628 - DNA, 301 bp, Unknown
  Ascusbbf_983757A, encodes 16S rRNA
agagtttgatcatggctcaggatgaacgctagctacaggcttaacacatgcaagtcgaggggcagcatgagggtagcaatacctttgatggcgaccggcgcacgggtgcgtaacacgtatccaatctacccatggctcgggaatagcctttcgaaagaaagattaatgcccgatggtctgtgattgagacatctcgattacagtaaagatttatcggcgatggatgaggatgcgtccgattaggtagtaggcggggtaacggcccacctagccgacgatcggtaggggttctgagaggaag

SEQ ID NO: 5629 - DNA, 301 bp, Unknown
  Ascusbbf_983757B, encodes 16S rRNA
agagtttgatcatggctcaggatgaacgctagctacaggcttaacacatgcaagtcgaggggcagcatgaaggtagcaatacctttgatggcgaccggcgcacgggtgcgtaacacgtatccaatctacccatggctcgggaatagcctttcgaaagaaagattaatgcccgatggtctgtgattgagacatctcgattacagtaaagatttatcggcgatggatgaggatgcgtccgattaggtagtaggcggggtaacggcccacctagccgacgatcggtaggggttctgagaggaag

SEQ ID NO: 5630 - DNA, 301 bp, Unknown
  Ascusbbf_983757C, encodes 16S rRNA
agagtttgatcctggctcaggatgaacgctagctacaggcttaacacatgcaagtcgaggggcagcatgagggtagcaatacctttgatggcgaccggcgcacgggtgcgtaacacgtatccaatctacccatggctcgggaatagcctttcgaaagaaagattaatgcccgatggtctgtgattgagacatctcgattacagtaaagatttatcggcgatggatgaggatgcgtccgattaggtagtaggcggggtaacggcccacctagccgacgatcggtaggggttctgagaggaag

SEQ ID NO: 5631 - DNA, 298 bp, Unknown; identical to SEQ ID NO: 5480
  Ascusbbf_52330A, encodes 16S rRNA

SEQ ID NO: 5632 - DNA, 300 bp, Unknown
  Ascusbbf_1085A, encodes 16S rRNA
agagtttgatcatggctcaggatgaacgctggcggcgtgcttaacacatgcaagtcgagcgaagcacggaaacggatttcttcggactgaaggttctgtgactgagcggcggacgggtgagtaacgcgtggggaacctgccctgtaccgggggataacagacagaaatgtctgctaataccgcataagcgcacgagaaggcatcttcttgtgtgaaaaactccggtggtacaggatggacccgcgttggattagccagttggcggggtaacggcccaccaaagcgacgatccatagccgg

SEQ ID NO: 5633 - DNA, 300 bp, Unknown
  Ascusbbf_1085B, encodes 16S rRNA
agagtttgatcctggctcaggatgaacgctggcggcgtgcttaacacatgcaagtcgagcgaagcgcagaaacggatttcttcggattgaaggttctgtgactgagcggcggacgggtgagtaacgcgtggggaacctgccctgtaccgggggataacagacagaaatgtctgctaataccgcataagcgcacgagaaggcatcttcttgtgtgaaaaactccggtggtacaggatggacccgcgttggattagccagttggcggggtaacggcccaccaaagcgacgatccatagccgg

SEQ ID NO: 5634 - DNA, 300 bp, Unknown
  Ascusbbf_1085C, encodes 16S rRNA
agagtttgatcctggctcaggatgaacgctggcggcgtgcttaacacatgcaagtcgagcgaagcacagaaacggatttcttcggattgaaggttctgtgactgagcggcggacgggtgagtaacgcgtggggaacctgccctgtaccgggggataacagacagaaatgtctgctaataccgcataagcgcacgagaaggcatctttttgtgtgaaaaactccggtggtacaggatggacccgcgttggattagccagttggcggggtaatggcccaccaaagcgacgatccatagccgg

SEQ ID NO: 5635 - DNA, 300 bp, Unknown
  Ascusbbf_1085D, encodes 16S rRNA
agagtttgatcctggctcaggatgaacgctggcggcgtgcttaacacatgcaagtcgagcgaagcacggaaacggatttcttcggattgaaggttctgtgactgagcggcggacgggtgagtaacgcgtggggaacctgccctgtaccgggggataacagacagaaatgtctgctaataccgcataagcgcacgagaaggcatcttcttgtgtgaaaaactccggtggtacaggatggacccgcgttggattagccagttggcggggtaacggcccaccaaagcgacgatccatagccgg

SEQ ID NO: 5636 - DNA, 300 bp, Unknown
  Ascusbbf_1085E, encodes 16S rRNA
agagtttgatcatggctcaggatgaacgctggcggcgtgcttaacacatgcaagtcgagcgaagcgcagaaacggatttcttcggattgaaggttctgtgactgagcggcggacgggtgagtaacgcgtggggaacctgccctgtaccgggggataacagacagaaatgtctgctaataccgcataagcgcacgagaaggcatcttcttgtgtgaaaaactccggtggtacaggatggacccgcgttggattagccagttggcggggtaacggcccaccaaagcgacgatccatagccgg

SEQ ID NO: 5637 - DNA, 300 bp, Unknown
  Ascusbbf_1085F, encodes 16S rRNA
agagtttgatcatggctcaggatgaacgctggcggcgtgcttaacacatgcaagtcgagcgaagcacagaaacggatttcttcggaataaaggttctgtgactgagcggcggacgggtgagtaacgcgtggggaacctgccctgtaccgggggataacagacagaaatgtctgctaataccgcataagcgcatgagaaggcatcttcttgtgtgaaaaactccggtggtacaggatggacccgcgttggattagccagttggcggggtaacggcccaccaaagcgacgatccatagccgg

SEQ ID NO: 5638 - DNA, 300 bp, Unknown
  Ascusbbf_1085G, encodes 16S rRNA
agagtttgatcatggctcaggatgaacgctggcggcgtgcttaacacatgcaagtcgagcgaagcgcttaaccggatttcttcggattgaaggttttgtgactgagcggcggacgggtgagtaacgcgtggggaacctgccctgtaccgggggataacagacagaaatgtctgctaatactgcataagcgcacgaaaaggcatctttttgtgtgaaaaactccggtggtacaggatggacccgcgttggattagccagttggcggggtaacggcccaccaaagcgacgatccatagccgg

SEQ ID NO: 5639 - DNA, 300 bp, Unknown
  Ascusbbf_1085H, encodes 16S rRNA
agagtttgatcctggctcaggatgaacgctggcggcgtgcttaacacatgcaagtcgagcgaagcgcttaaccggatttcttcggattgaaggttttgtgactgagcggcggacgggtgagtaacgcgtggggaacctgccctgtaccgggggataacagacagaaatgtctgctaataccgcataagcgcacgaaaaggcatctttttgtgtgaaaaactccggtggtacaggatggacccgcgttggattagccagttggcggggtaacggcccaccaaagcgacgatccatagccgg

SEQ ID NO: 5640 - DNA, 300 bp, Unknown
  Ascusbbf_1085I, encodes 16S rRNA
agagtttgatcatggctcaggatgaacgctggcggcgtgcttaacacatgcaagtcgagcgaagcgctcaaccggatttcttcggattgaaggttttgcgactgagcggcggacgggtgagtaacgcgtggggaacctgccctgtaccgggggataacagacagaaatgtctgctaataccgcataagcgcacgagaaggcatctttttgtgtgaaaaactccggtggtacaggatggacccgcgttggattagccagttggcggggtaacggcccaccaaagcgacgatccatagccgg

SEQ ID NO: 5641 - DNA, 300 bp, Unknown
  Ascusbbf_1085J, encodes 16S rRNA
agagtttgatcctggctcaggatgaacgctggcggcgtgcttaacacatgcaagtcgagcgaagcacagaaacggatttcttcggattgaaggttctgtgactgagcggcggacgggtgagtaacgcgtggggaacctgccctgtaccgggggataacagacagaaatgtctgctaataccgcataagcgcacgagaaggcatctttttgtgtgaaaaactccggtggtacaggatggacccgcgttggattagccagttggcggggtaacggcccaccaaagcgacgatccatagccgg

SEQ ID NO: 5642 - DNA, 300 bp, Unknown; identical to SEQ ID NO: 5636
  Ascusbbf_1085K, encodes 16S rRNA

SEQ ID NO: 5643 - DNA, 225 bp, Unknown
  Ascusbbf_154A, encodes 16S rRNA
agagtttgatcctggctcagattgaacgctggcggcaggcctaatacatgcaagtcgaacggtaacataggaaaagcttgcttttcctgatgacgagtggcggacgggtgagtaaagtttgggaagttacctgatagagggggacaacagttggaaacgactgctaataccgcatacagcctgagggtgaaagcagcaatgcgctatcagatgcgcccaaatggg

SEQ ID NO: 5644 - DNA, 301 bp, Unknown
  Ascusbbf_154B, encodes 16S rRNA
agagtttgatcctggctcagattgaacgctggcggcaggcctaatacatgcaagtcgaacggtaacataggaaaagcttgcttttcctgatgacgagtggcggacgggtgagtaaagtttgggaagctacctgatagagggggacaacagttggaaacgactgctaataccgcatacagcctgagggtgaaagcagcaatgcgctatcagatgcgcccaaatgggattagctagtaggtgaggtaaaggctcacctaggcgacgatctctagctggtctgagaggatgatcagccacattg

SEQ ID NO: 5645 - DNA, 301 bp, Unknown
  Ascusbbf_154D, encodes 16S rRNA
agagtttgatcctggctcagattgaacgctggcggcaggcctaatacatgcaagtcgaacggtaacataggaaaagcttgcttttcctgatgacgagtggcggacgggtgagtaaagtttgggaagctacctgatagagggggacaacagttggaaacgactgctaataccgcatacagcctgagggtgaaagcagcaatgcgctatcagatgcgcccaaatgggattagctagtaggtgaggtaaaggctcacctaggcgacgatcagtagccgacctgagagggtgaccggccacattg

SEQ ID NO: 5646 - DNA, 301 bp, Unknown
  Ascusbbf_154E, encodes 16S rRNA
agagtttgatcatggctcagattgaacgctggcggcaggcctaatacatgcaagtcgaacggtaacataagaaagcttgctttcttgatgacgagtggcggacgggtgagtaatatttgggaagctacctgatagagggggacaacagttggaaacgactgctaataccgcatacagcctgagggtgaaagcagcaatgcgctatcagatgcgcccaaacgggattagctagtaggtgaggtaaaggctcacctaggcgacgatctctagctggtctgagaggatgatcagccacattggg

SEQ ID NO: 5647 - DNA, 301 bp, Unknown
  Ascusbbf_154F, encodes 16S rRNA
agagtttgatcctggctcagattgaacgctggcggcaggcctaatacatgcaagtcgaacggtaacataagaaagcttgctttcttgatgacgagtggcggacgggtgagtaatatttgggaagctacctgatagagggggacaacagttggaaacgactgctaataccgcatacagcctgagggtgaaagcagcaatgcgctatcagatgcgcccaaacgggattagctagtaggtgaggtaaaggctcacctaggcgacgatctctagctggtctgagaggatgatcagccacattggg

SEQ ID NO: 5648 - DNA, 301 bp, Unknown
  Ascusbbf_154G, encodes 16S rRNA
agagtttgatcatggctcagattgaacgctggcggcaggcctaatacatgcaagtcgaacggtaacataggaaaagcttgcttttcctgatgacgagtggcggacgggtgagtaaagtttgggaagctacctgatagagggggacaacagttggaaacgactgctaataccgcatacagcctgagggtgaaagcagcaatgcgctatcagatgcgcccaaatgggattagctagtaggtgaggtaaaggctcacctaggcgacgatctctagctggtctgagaggatgatcagccacattg

SEQ ID NO: 5649 - DNA, 301 bp, Unknown
  Ascusbbf_154H, encodes 16S rRNA
agagtttgatcctggctcagattgaacgctggcggcaggcctaatacatgcaagtcgaacggtaacataggaaaagcctgcttttcctgatgacgagtggcggacgggtgagtaaagtttgggaagttacctgatagagggggacaacagttggaaacgactgctaataccgcatacagcctgagggtgaaagcagcaatgcgctatcagatgcgcccaaatgggattagctagtaggtgaggtaaaggctcacctaggcgacgatctctagctggtctgagaggatgatcagccacattg

SEQ ID NO: 5650 - DNA, 301 bp, Unknown
  Ascusbbf_154I, encodes 16S rRNA
agagtttgatcatggctcagattgaacgctggcggcaggcctaatacatgcaagtcgaacggtaacataggaaaagcttgcttttcctgatgacgagtggcggacgggtgagtaagatttgggaagctacctgatagagggggacaacagttggaaacgactgctaataccgcatacagcctgagggtgaaagcagcaatgcgctatcagatgcgcccaaatgggattagctagtaggtgaggtaaaggctcacctaggcgacgatctctagctggtctgagaggatgatcagccacattg

SEQ ID NO: 5651 - DNA, 300 bp, Unknown
  Ascusbbf_154M, encodes 16S rRNA
agagtttgatcctggctcagattgaacgctggcggcaggcctaatacacgcaagtcgaacggtaacataggaaaagcttgcttttcctgatgacgagtggcggacgggtgagtaaagtttgggaagttacctgatagagggggacaacagttggaaacgactgctaataccgcatacagcctgagggtgaaagcagcaatgcgctatcagatgcgcccaaatgggattagctagtaggtgaggtaaaggctcacctaggcgacgatctctagctggtctgagaggatgatcagccacatt

SEQ ID NO: 5652 - DNA, 225 bp, Unknown
  Ascusbbf_1010A, encodes 16S rRNA
agagtttgatcatggctcaggacgaacgctggcggcgtgcttaacacatgcaagtcgaacgagacgatttagaagcttgcttttattgagtcgagtggcaaacgggtgagtaacgcgtagacaacctgccgcaaagatggggacaacagtccgaaaggactgctaataccgaatgttgtatctcctccgcatggaagagatattaaagatggcctctacttgtaa

SEQ ID NO: 5653 - DNA, 301 bp, Unknown
  Ascusbbf_1010B, encodes 16S rRNA
agagtttgatcctggctcaggacgaacgctggcggcgtgcttaacacatgcaagtcgaacgagacgatttagaagcttgcttttattgagtcgagtggcaaacgggtgagtaacgcgtagacaacctgccgcaaagatggggacaacagtccgaaaggactgctaataccgaatgttgtatctcctccgcatggaagagatattaaagatggcctctacttgtaagctatcgctttgcgatgggtctgcgtctgattagctagttggtggggcaacggcctaccaaggcgacgatcagtag

SEQ ID NO: 5654 - DNA, 301 bp, Unknown; identical to SEQ ID NO: 5413
  Ascusbbf_1010C, encodes 16S rRNA

SEQ ID NO: 5655 - DNA, 301 bp, Unknown
  Ascusbbf_1010D, encodes 16S rRNA
agagtttgatcctggctcaggacgaacgctggcggcgtgcttaacacatgcaagtcgaacgagacgatttagaagcttgcttttattgagtcgagtggcaaacgggtgagtaacgcgtagacaacctgccgcaaagatggggacaacagtccgaaaggactgctaataccgaatgttgtatctcctccgcatgaaagagatattaaagatggcctctacttgtaagctatcgctttgcgatgggtctgcgtctgattagctagttggtggggcaacggcctaccaaggcgacgatcagtag

SEQ ID NO: 5656 - DNA, 301 bp, Unknown
  Ascusbbf_1010E, encodes 16S rRNA
agagtttgatcatggctcaggacgaacgctggcggcgtgcttaacacatgcaagtcgaacgagacgaattagaagcttgcttttgacgagtcgagtggcaaacgggtgagtaacgcgtagacaacctgccgcaaagatggggacaacagtccgaaaggactgctaataccgaatgttgtatctcctccgcatggaagagatattaaagatggcctctacttgtaagctatcgctttgcgatgggtctgcgtctgattagctagttggtggggcaacggcctaccaaggcgacgatcagtag

SEQ ID NO: 5657 - DNA, 301 bp, Unknown
  Ascusbbf_1010F, encodes 16S rRNA
agagtttgatcctggctcagaacgaacgctggcggcaggtcttaggcatgcaagtcgaacgagacgatttagaagcttgcttttattgagtcgagtggcaaacgggtgagtaacgcgtagacaacctgccgcaaagatggggacaacagtccgaaaggactgctaataccgaatgttgtatctcctccgcatggaagagatatcaaagatggcctctacttgtaagctatcgctttgcgatgggtctgcgtctgattagctagttggtggggcaacggcctaccaaggcgacgatcagtag

SEQ ID NO: 5658 - DNA, 301 bp, Unknown; identical to SEQ ID NO: 5577
  Ascusbbf_1010G, encodes 16S rRNA

SEQ ID NO: 5659 - DNA, 301 bp, Unknown
  Ascusbbf_1010H, encodes 16S rRNA
agagtttgatcatggctcaggacgaacgctggcggcgtgcttaacacatgcaagtcgaacgagacgatttagaagcttgcttttattgagtcgagtggcaaacgggtgagtaacgcgtagacaacctgccgcaaagatggggacaacagtccgaaaggactgctaataccgaatgttgtgtatcctccgcatggaggacgcattaaagatggcctctacttgtaagctatcgctttgcgatgggtctgcgtctgattagctagttggtggggcaacggcctaccaaggcgacgatcagtag

SEQ ID NO: 5660 - DNA, 301 bp, Unknown; identical to SEQ ID NO: 5549
  Ascusbbf_1010I, encodes 16S rRNA

SEQ ID NO: 5661 - DNA, 301 bp, Unknown
  Ascusbbf_1010J, encodes 16S rRNA
agagtttgatcctggctcaggacgaacgctggcggcgtgcttaacacatgcaagtcgaacgagacgaattagaagcttgcttttgacgagtcgagtggcaaacgggtgagtaacgcgtagacaacctgccgcaaagatggggacaacagtccgaaaggactgctaataccgaatgttgtatctcctccgcatggaagagatattaaagatggcctctacttgtaagctatcgctttgcgatgggtctgcgtctgattagctagttggtggggcaacggcctaccaaggcgacgatcagtag

SEQ ID NO: 5662 - DNA, 225 bp, Unknown
  Ascusbbf_5575A, encodes 16S rRNA
agagtttgatcctggctcaggacgaacgctggcggcgtgcttaacgcatgcaagtcgaacgagaagagatgagaagcttgcttcttatcaattcgagtggcaaacgggcgagtaacgcgtaagcaacctacccttcagatggggacaacagctggaaacggctgctaataccgaatacgttctttttgtcgcatggcagagggaagaaaggaaggctcttcggag

SEQ ID NO: 5663 - DNA, 225 bp, Unknown
  Ascusbbf_5575B, encodes 16S rRNA
agagtttgatcctggctcaggacgaacgctggcggcgtgcttaacacatgcaagtcgaacgagaagagatgagaagcttgcttcttatcaattcgagtggcaaacgggtgagtaacgcgtaagcaacctgccctctagatggggacaacagctggaaacggctgctaataccgaatacgttttttctgtcgcatggcagagggaagaaagggaggctcttcggag

SEQ ID NO: 5664 - DNA, 300 bp, Unknown
  Ascusbbf_5575C, encodes 16S rRNA
agagtttgatcctggctcaggacgaacgctggcggcgtgcttaacacatgcaagtcgaacgagaagagatgagaagcttgcttcttattgatttgagtggcaaacgggtgagtaacgcgtaagcaacctgcccttcagatggggacaacagctggaaacggctgctaataccgaatacgttctctctgccgcatgacagagggaagaaagggaggctctttggagctttcgctggaggagggacttgcgtctgattagctagttggaggggtaacggcccaccaaggcgacgatcagtag

SEQ ID NO: 5665 - DNA, 300 bp, Unknown; identical to SEQ ID NO: 5586
  Ascusbbf_5575D, encodes 16S rRNA

SEQ ID NO: 5666 - DNA, 300 bp, Unknown; identical to SEQ ID NO: 5585
  Ascusbbf_5575E, encodes 16S rRNA

SEQ ID NO: 5667 - DNA, 300 bp, Unknown; identical to SEQ ID NO: 5580
  Ascusbbf_5575F, encodes 16S rRNA

SEQ ID NO: 5668 - DNA, 300 bp, Unknown; identical to SEQ ID NO: 5578
  Ascusbbf_5575G, encodes 16S rRNA

SEQ ID NO: 5669 - DNA, 300 bp, Unknown
  Ascusbbf_5575H, encodes 16S rRNA
agagtttgatcctggctcaggacgaacgctggcggcgtgcttaacacatgcaagtcgaacgagaagagatgagaagcttgcttcttatcgattcgagtggcaaacgggtgagtaacgcgtaagcaacctgcccttcagatggggacaacagctggaaacggctgctaataccgaatacgttctttttgtcgcatggcagagggaagaaagggaggctcttcggagctttcgctgaaggaggggcttgcgtctgattagctagttggaggggtaacggcccaccaaggcgacgatcagtag

SEQ ID NO: 5670 - DNA, 301 bp, Unknown
  Ascusbbf_775A, encodes 16S rRNA
agagtttgatcctggctcaggatgaacgctagcgacaggcctaacacatgcaagtcgaggggcagcgcgggagaagcttgcttttcctggcggcgaccggcgcacgggtgcgtaacaggtgtgcaatctgtcctataccggggcatagcccagcgaaagttggattaattctccatgtgagcgagtgccgcatgacacacgcttgaaacgtaagggtatagggtgagcacgcttctgattagatagttggtggggtaacggctcaccaagtcgacgatcagtaggggttctgagaggaagg

SEQ ID NO: 5671 - DNA, 301 bp, Unknown
  Ascusbbf_775B, encodes 16S rRNA
agagtttgatcatggctcaggatgaacgctagcgacaggcctaacacatgcaagtcgaggggcagcgcgggagaagcttgcttttcctggcggcgaccggcgcacgggtgcgtaacaggtgtgcaatctgtcctataccggggcatagcccagcgaaagttggattaattctccatgtgagcgagtgccgcatgacacacgcttgaaacgtaagggtatagggtgagcacgcttctgattagatagttggtggggtaacggctcaccaagtcgacgatcagtaggggttctgagaggaagg

SEQ ID NO: 5672 - DNA, 300 bp, Unknown
  Ascusbbf_24302A, encodes 16S rRNA
agagtttgatcatggctcaggacgaacgctggcggcgtgcttaacacatgcaagtcgagcgatgaagctccttcgggagcggattagcggcggacgggtgagtaacacgtgggtaacctgcctcatagaggggaatagcctttcgaaaggaagattaataccgcataagattgtagtgccgcatggcatagcaattaaaggagtaatccgctatgagatggacccgcgtcgcattagctagttggtgaggtaacggctcaccaaggcgacgatgcgtagccgacctgagagggtgatcgg

SEQ ID NO: 5673 - DNA, 300 bp, Unknown
  Ascusbbf_24302B, encodes 16S rRNA
agagtttgatcctggctcaggacgaacgctggcggcgtgcttaacacatgcaagtcgagcgatgaagttccttcgggagtggattagcggcggacgggtgagtaacacgtgggtaacctgcctcatagaggggaatagcctttcgaaaggaagattaataccgcataagattgtagtgccgcatggtacagcaattaaaggagtaatccgctatgagatggacccgcgtcgcattagctagttggtgaggtaacggctcaccaaggcgacgatgcgtagccgacctgagagggtgatcgg

SEQ ID NO: 5674 - DNA, 301 bp, Unknown
  Ascusbbf_24302C, encodes 16S rRNA
agagtttgatcatggctcaggatgaacgctggcggcgtgcttaacacatgcaagtcgagcgatgaagctccttcgggagtggattagcggcggacgggtgagtaacacgtgggtaacctgcctcatagaggggaatagccttccgaaaggaagattaataccgcataagattgtagtgccgcatggcatagcaattaaaggagtaatccgctatgagatggacccgcgtcgcattagctagttggtgaggtaacggctcaccaaggcgacgatgcgtagccgacctgagagggtgatcggg

SEQ ID NO: 5675 - DNA, 300 bp, Unknown
  Ascusbbf_24302D, encodes 16S rRNA
agagtttgatcctggctcaggacgaacgctggcggcgtgcttaacacatgcaagtcgagcgatgaagttccttcgggaatggattagcggcggacgggtgagtaacacgtgggtaacctgcctcgtagaggggaatagccttccgaaaggaagattaataccgcataagattgtagtgccgcatggcatagcaattaaaggagtaatccgctatgagatggacccgcgtcgcattagctagttggtgaggtaacggctcaccaaggcgacgatgcgtagccgacctgagagggtgatcgg

SEQ ID NO: 5676 - DNA, 300 bp, Unknown
  Ascusbbf_24302E, encodes 16S rRNA
agagtttgatcctggctcaggacgaacgctggcggcgtgcttaacacatgcaagtcgagcgatgaagctccttcgggagtgaattagcggcggacgggtgagtaacacgtgggtaacctgcctcatagaggggaatagcctttcgaaaggaagattaataccgcataagattgtagtaccgcatggtacagcaattaaaggagtaatccgctatgagatggacccgcgtcgcattagctagttggtgaggtaacggctcaccaaggcgacgatgcgtagccgacctgagagggtgatcgg

SEQ ID NO: 5677 - DNA, 300 bp, Unknown
  Ascusbbf_24302F, encodes 16S rRNA
agagtttgatcctggctcaggacgaacgctggcggcgtgcttaacacatgcaagtcgagcgatgaagttccttcgggaacggattagcggcggacgggtgagtaacacgtgggtaacctgcctcatagaggggaatagcctttcgaaaggaagattaataccgcataagattgtagtgccgcatggcatagcaattaaaggagtaatccgctatgagatggacccgcgtcgcattagctagttggtgaggtaacggctcaccaaggcgacgatgcgtagccgacctgagagggtgatcgg

SEQ ID NO: 5678 - DNA, 300 bp, Unknown
  Ascusbbf_24302G, encodes 16S rRNA
agagtttgatcctggctcaggacgaacgctggcggcgtgcttaacacatgcaagtcgagcgatgaagctccttcgggagtggattagcggcggacgggtgagtaacacgtgggtaacctgcctcatagaggggaatagcctttcgaaaggaagattaataccgcataagattgtagtgccgcatggcatagcaattaaaggagtaatccgctatgagatggacccgcgtcgcattagctagttggtgaggtaacggctcaccaaggcgacgatgcgtagccgacctgagagggtgatcgg

SEQ ID NO: 5679 - DNA, 300 bp, Unknown
  Ascusbbf_24302H, encodes 16S rRNA
agagtttgatcctggctcaggacgaacgctggcggcgtgcttaacacatgcaagtcgagcgatgaagcttcttcggaagtggattagcggcggacgggtgagtaacacgtgggtaacctgcctcatagaggggaatagcctttcgaaaggaagattaataccgcataagattgtagtaccgcatggtacagcaattaaaggagtaatccgctatgagatggacccgcgtcgcattagctagttggtgaggtaacggctcaccaaggcgacgatgcgtagccgacctgagagggtgatcgg

SEQ ID NO: 5680 - DNA, 300 bp, Unknown
  Ascusbbf_24302I, encodes 16S rRNA
agagtttgatcatggctcaggacgaacgctggcggcgtgcttaacacatgcaagtcgagcgatgaagctccttcgggagtggattagcggcggacgggtgagtaacacgtgggtaacctgcctcatagaggggaatagcctttcgaaaggaagattaataccgcataagattgtagtgccgcatggcatagcaattaaaggagtaatccgctatgagatggacccgcgtcgcattagctagttggtgaggtaacggctcaccaaggcgacgatgcgtagccgacctgagagggtgatcgg

SEQ ID NO: 5681 - DNA, 301 bp, Unknown
  Ascusbbf_24302J, encodes 16S rRNA
agagtttgatcatggctcaggacgaacgctggcggcgtgcttaacacatgcaagtcgagcgagatgaactccttcgggagggactctagcggcggacgggtgagtaacacgtgggtaacctgcctcatagaggggaatagcctttcgaaaggaagattaataccgcataagattgtagtgccgcatggcatagcaattaaaggagtaatccgctatgagatggacccgcgtcgcattagctagttggtgaggtaacggctcaccaaggcgacgatgcgtagccgacctgagagggtgatcg

SEQ ID NO: 5682 - DNA, 301 bp, Unknown
  Ascusbbf_1A, encodes 16S rRNA
agagtttgatcatggctcagattgaacgctggcggcaggcctaatacatgcaagtcggacggtaacataagaaaagcttgcttttcttgatgacgagtggcggacgggcgagtaagatttgggaagctacctgatagagggggacaacagttggaaacgactgctaataccgcatacagccttagggtgaaagaagaaattcgctatcagatgtgcccaaacgggattagctagtaggtgaggtaaaggctcacctaggcgacgatctctagctggtctgagaggatgatcagccacattg

SEQ ID NO: 5683 - DNA, 301 bp, Unknown
  Ascusbbf_1B, encodes 16S rRNA
agagtttgatcatggctcagattgaacgctggcggcaggcctaatacatgcaagtcgaacggtaacataagaaaagcttgcttttcttgatgacgagtggcggacgggtgagtaacatttgggaaactacctgatagagggggacaacagttggaaacgactgctaataccgcatacagcctaagggtgaaagaagcaattcgctatcagatgtgcccaaacgggattagctagtaggtgaggtaaaggctcacctaggcgatgatctctagctggtctgagaggatgatcagccacattg

SEQ ID NO: 5684 - DNA, 301 bp, Unknown
  Ascusbbf_1C, encodes 16S rRNA
agagtttgatcctggctcagattgaacgctggcggcaggcctaatacatgcaagtcgaacggtaacataagaaaagcttgcttttcttgatgacgagtggcggacgggtgagtaagatttgggaaactacctgatagagggggacaacagttggaaacgactgctaataccgcatacagccttagggtgaaagaagaaattcgctatcagatgtgcccaaatgggattagctagtaggtgaggtaaaggctcacctaggcgacgatctctagctggtctgagaggatgatcagccacattg

SEQ ID NO: 5685 - DNA, 301 bp, Unknown; identical to SEQ ID NO: 5647
  Ascusbbf_1D, encodes 16S rRNA

SEQ ID NO: 5686 - DNA, 300 bp, Unknown
  Ascusbbf_1E, encodes 16S rRNA
agagtttgatcatggctcagattgaacgctggcggcaggcctaatacatgcaagtcgaacggtaacataaaagaagcttgcttcttttgatgacgagtggcggacgggtgagtaatatttgggaaactacctgatagagggggacaacagttggaaacgactgctaataccgcataaagcctaagggtgaaagcagcaatgcgctatcagatgtgcccaaacgggattagctagtaggtgaggtaaaggctcacctaggcgacgatctctagctggtctgagaggatgatcagccacatt

SEQ ID NO: 5687 - DNA, 301 bp, Unknown
  Ascusbbf_1F, encodes 16S rRNA
agagtttgatcatggctcagattgaacgctggcggcaggcctaatacatgcaagtcgaacggtaacataagaaaagcttgcttttcttgatgacgagtggcggacgggtgagtaagatttgggaaactacctgatagagggggacaacagttggaaacgactgctaataccgcatacagccttagggtgaaagaagaaattcgctatcagatgtgcccaaatgggattagctagtaggtgaggtagaggctcacctaggcgacgatctctagctggtctgagaggatgatcagccacattg

SEQ ID NO: 5688 - DNA, 301 bp, Unknown
  Ascusbbf_1G, encodes 16S rRNA
agagtttgatcctggctcagattgaacgctggcggcaggcctaatacatgcaagtcgaacggtaacataagaaaagcttgcttttcttgatgacgagtggcggacgggtgagtaacatttgggaaactacctgatagagggggacaacagttggaaacgactgctaataccgcatacagcctaagggtgaaagaagcaattcgctatcagatgtgcccaaacgggattagctagtaggtgaggtaaaggctcacctaggcgatgatctctagctggtctgagaggatgatcagccacattg

SEQ ID NO: 5689 - DNA, 300 bp, Unknown
  Ascusbbf_1H, encodes 16S rRNA
agagtttgatcctggctcagattgaacgctggcggcaggcctaatacatgcaagtcgaacggtaacataagaaaagcttgcttttcttgatgacgagtggcggacgggtgagtaacatttgggaaactacctgatagagggggacaacagttggaaacgactgctaataccgcatatagcctaagggtgaaagaagtaattcgctatcagatgtgcccaaacgggattagctagtaggtgaggtaaaggctcacctaggcgatgatctctagctggtctgagaggatgatcagccacatt

SEQ ID NO: 5690 - DNA, 301 bp, Unknown
  Ascusbbf_1I, encodes 16S rRNA
agagtttgatcctggctcagattgaacgctggcggcaggcctaatacatgcaagtcggacggtaacataagaaaagcttgcttttcttgatgacgagtggcggacgggtgagtaagatttgggaagctacctgatagagggggacaacagttggaaacgactgctaataccgcatacagcctcagggtgaaagaagcgattcgctatcagatgtgcccaaacgggattagctagtaggtgaggtaaaggctcacctaggcgacgatctctagctggtctgagaggatgatcagccacattg

SEQ ID NO: 5691 - DNA, 301 bp, Unknown
  Ascusbbf_1J, encodes 16S rRNA
agagtttgatcatggctcagattgaacgctggcggcaggcctaatacatgcaagtcgaacggtaacataagaaaagcttgcttttcttgatgacgagtggcggacgggtgagtaacatttgggaaactacctgatagagggggacaacagttggaaacgactgctaataccgcatatagcctaagggtgaaagaagtaattcgctatcagatgtgcccaaacgggattagctagtaggtgaggtaaaggctcacctaggcgatgatctctagctggtctgagaggatgatcagccacattg

SEQ ID NO: 5692 - DNA, 301 bp, Unknown
  Ascusbbf_1K, encodes 16S rRNA
agagtttgatcctggctcagattgaacgctggcggcaggcctaatacatgcaagtcgaacggtaacataagaaaagcttgcttttcttgatgacgagtggcggacgggtgagtaagatttgggaaactacctgatagagggggacaacagttggaaacgactgctaataccgcatacagccttagggtgaaagaagaaattcgctatcagatgtgcccaaacgggattagctagtaggtgaggtaaaggctcacctaggcgacgatctctagctggtctgagaggatgatcagccacattg

SEQ ID NO: 5693 - DNA, 300 bp, Unknown
  Ascusbbf_52548A, encodes 16S rRNA
agagtttgatcatggctcaggatgaacgctggcggcgtgcttaacacatgcaagtcgaacgaagcgcattgtttgaattcttcggaaggaagataatgtgactgagtggcggacgggtgagtaacgcgtgggtaacctgccatgtacagggggacaacagttggaaacggctgctaataccgcataagcgcacgagattgcatgatctagtgtgaaaaactccggtggtatatgatggacccgcgtctgattagctagttggtaaggtaacggcttaccaaggcgacgatcagtagccga

SEQ ID NO: 5694 - DNA, 300 bp, Unknown
  Ascusbbf_52548B, encodes 16S rRNA
agagtttgatcctggctcaggatgaacgctggcggcgtgcttaacacatgcaagtcgaacgaagcgcattgtttgaattcttcggaaggaagataatgtgactgagtggcggacgggtgagtaacgcgtgggtaacctgccatgtacagggggacaacagttggaaacggctgctaataccgcataagcgcacgagattgcatgatctagtgtgaaaaactccggtggtatatgatggacccgcgtctgattagctagttggtaaggtaacggcttaccaaggcgacgatcagtagccga

SEQ ID NO: 5695 - DNA, 300 bp, Unknown
  Ascusbbf_50658A, encodes 16S rRNA
agagtttgatcatggctcaggacgaacgctggcggcgtgcctaacacatgcaagtcgagcggagacatacagcggataggaagttttcggatggaattgaagaagtatgttttagcggcggacgggtgagtaacgcgtgagcaatctgtccttcacagggggataacacagcgaaagttgtactaataccgcataagaccacggtgttgcatgacacaggggtcaaaggaggaatccggtgaagggtgagctcgcgtccgattagatagtaggtgaggtaacggcccacctagtcgacga

SEQ ID NO: 5696 - DNA, 225 bp, Unknown
  Ascusbbf_850A, encodes 16S rRNA
agagtttgatcatggctcaggataaacgctggcggcgtgcttaacacatgcaagtcgaacgaggaacagaagacgaggtcttcggattaaattgactgttccgagtggcggacgggtgagtaacgcgtggggaacctgccttatactgagggacaacagctggaaacggctgctaatacctcatatgcgcacaggaaggcatcttccggtgtggaaagaaattcg

SEQ ID NO: 5697 - DNA, 300 bp, Unknown
  Ascusbbf_850B, encodes 16S rRNA
agagtttgatcctggctcaggataaacgctggcggcgtgcttaacacatgcaagtcgaacgaggaacagaagacgaggtcttcggattaaattgactgttccgagtggcggacgggtgagtaacgcgtggggaacctgccttatactgagggacaacagctggaaacggctgctaatacctcatatgcgcacaggaaggcatcttccggtgtggaaagaaattcggtataagatggccccgcgtctgattaggcagttggtgagataacagcccaccaaaccgacgatcagtagccgacc

SEQ ID NO: 5698 - DNA, 298 bp, Unknown
  Ascusbbf_850C, encodes 16S rRNA
agagtttgatcatggctcaggataaacgctggcggcgtgcttaacacatgcaagtcgaacgaggaacagaagacgagatcttcggatcaaattgactgttccgagtggcggacgggtgagtaacgcgtggggaacctgccttatactgagggacaacagctggaaacggctgctaatacctcatatgcgcacaggaaggcatcttccggtgtggaaagaaattcggtataagatggccccgcgtctgattaggcagttggtgagataacagcccaccaaaccgacgatcagtagccga

SEQ ID NO: 5699 - DNA, 298 bp, Unknown
  Ascusbbf_850D, encodes 16S rRNA
agagtttgatcctggctcaggataaacgctggcggcgtgcttaacacatgcaagtcgaacgaggaacagaagatgaggtcttcggattaaattgactgttccgagtggcggacgggtgagtaacgcgtggggaacctgccttatactgagggacaacagctggaaacggctgctaatacctcatatgcgcacaggaaggcatcttccggtgtggaaagaaattcggtataagatggccccgcgtctgattaggcagttggtgagataacagcccaccaaaccgacgatcagtagccga

SEQ ID NO: 5700 - DNA, 298 bp, Unknown
  Ascusbbf_850E, encodes 16S rRNA
agagtttgatcatggctcaggataaacgctggcggcgtgcttaacacatgcaagtcgaacgaggaacagaagacgaggtcttcggattaaattgactgttccgagtggcggacgggtgagtaacgcgtggggaacctgccttatactgagggacaacagctggaaacggctgctaatacctcatatgcgcacaggaaggcatcttccggtgtggaaagaaattcggtataagatggccccgcgtctgattaggcagttggtgagataacagcccaccaaaccgacgatcagtagccga

SEQ ID NO: 5701 - DNA, 298 bp, Unknown
  Ascusbbf_850F, encodes 16S rRNA
agagtttgatcatggctcaggataaacgctggcggcgtgcttaacacatgcaagtcgaacgaggaacagaagacgaggtcttcggatcaaattgactgttccgagtggcggacgggtgagtaacgcgtggggaacctgccttatactgagggacaacagctggaaacggctgctaatacctcatatgcgcacaggaaggcatcttccggtgtggaaagaaattcggtataagatggccccgcgtctgattaggcagttggtgagataacagcccaccaaaccgacgatcagtagccga

SEQ ID NO: 5702 - DNA, 298 bp, Unknown
  Ascusbbf_850G, encodes 16S rRNA
agagtttgatcctggctcaggataaacgctggcggcgtgcttaacacatgcaagtcgaacgaggaacagaagacgaggtcttcggattaaattgactgttccgagtggcggacgggtgagtaacgcgtggggaacctgccttatactgagggacaacagctggaaacggctgctaatacctcatatgcgcacaggaaggcatcttccggtgtggaaagaaattcggtataagatggccccgcgtctgattaggcagttggtgagataacagcccaccaaaccgacgatcagtagccga

SEQ ID NO: 5703 - DNA, 298 bp, Unknown
  Ascusbbf_850H, encodes 16S rRNA
agagtttgatcctggctcaggataaacgctggcggcgtgcttaacacatgcaagtcgaacgagggacagaagacgagatctttggattaaattgactgtttcgagtggcggacgggtgagtaacgcgtggggaacctgccttatactgagggacaacagctggaaacggctgctaatacctcatatgcgcacaggaaggcatcttccggtgtggaaagaaattcggtataagatggccccgcgtctgattaggcagttggtgagataacagcccaccaaaccgacgatcagtagccga

SEQ ID NO: 5704 - DNA, 298 bp, Unknown
  Ascusbbf_850I, encodes 16S rRNA
agagtttgatcatggctcaggataaacgctggcggcgtgcttaacacatgcaagtcgaacgagggacagaagacgagatctttggattaaattgactgtttcgagtggcggacgggtgagtaacgcgtggggaacctgccttatactgagggacaacagctggaaacggctgctaatacctcatatgcgcacaggaaggcatcttccggtgtggaaagaaattcggtataagatggccccgcgtctgattaggcagttggtgagataacagcccaccaaaccgacgatcagtagccga

SEQ ID NO: 5705 - DNA, 300 bp, Unknown
  Ascusbbf_850J, encodes 16S rRNA
agagtttgatcatggctcaggataaacgctggcggcgtgcttaacacatgcaagtcgaacgaggaacagaagacgaggtcttcggattaaattgactgttccgagtggcggacgggtgagtaacgcgtggggaacctgccttatactgagggacaacagctggaaacggctgctaatacctcatatgcgcacaggaaggcatcttccggtgtggaaagaaattcggtataagatggccccgcgtctgattaggcagttggtgagataacagcccaccaaaccgacgatcagtagccgacc

SEQ ID NO: 5706 - DNA, 225 bp, Unknown
  Ascusbbf_4A, encodes 16S rRNA
agagtttgatcatggctcaggatgaacgctagctacaggcttaacacatgcaagtcgaggggaaacgacagagagtgcttgcactttttgggcgtcgaccggcgaatgggtgagtaacgcgtatccaacctgcccttgactgagggatagtccagtgaaaactgaattaatacctcatgttctcctcagacggcatcagacgaggagcaaagattaatcggtcaa

SEQ ID NO: 5707 - DNA, 301 bp, Unknown
  Ascusbbf_4B, encodes 16S rRNA
agagtttgatcctggctcaggatgaacgctagctacaggcttaacacatgcaagtcgaggggaaacgacagagagtgcttgcactttttgggcgtcgaccggcgaatgggtgagtaacgcgtatccaacctgcctttgactgagggatagcccagtgaaaactgaattaatacctcatgttctcctcagacggcatcagacgaggagcaaagattaatcggtcaaggatggggatgcgtctgattaggtagtaggcggggtaacggcccacctagccgacgatcagtaggggttctgagag

SEQ ID NO: 5708 - DNA, 301 bp, Unknown
  Ascusbbf_4C, encodes 16S rRNA
agagtttgatcctggctcaggatgaacgctagctacaggcttaacacatgcaagtcgaggggaaacgacatagagtgcttgcactttatgggcgtcgaccggcgaatgggtgagtaacgcgtatccaacctgcccttgactgagggatagcccagtgaaaactgaattaatacctcatgttctcctcagacggcatcagacgaggagcaaagattaatcggtcaaggatggggatgcgtctgattaggtagtaggcggggtaacggcccacctagccgacgatcagtaggggttctgagag

SEQ ID NO: 5709 - DNA, 301 bp, Unknown
  Ascusbbf_4D, encodes 16S rRNA
agagtttgatcctggctcaggatgaacgctagctacaggcttaacacatgcaagtcgaggggaaacgacagagagtgcttgcactttttgggcgtcgaccggcgaatgggtgagtaacgcgtatccaacctgcccttgactgagggatagcccagtgaaaactgaattaatacctcatgttctcctcagacggcatcagacgaggagcaaagattaatcggtcaaggatggggatgcgtctgattaggtagtaggcggggtaacggcccacctagccgacgatcagtaggggttctgagag

SEQ ID NO: 5710 - DNA, 301 bp, Unknown
  Ascusbbf_4E, encodes 16S rRNA
agagtttgatcatggctcaggatgaacgctagccacaggcttaacacatgcaagtcgaggggaaacgacagagagtgcttgcactttttgggcgtcgaccggcgaatgggtgagtaacgcgtatccaacctgcctttgactgagggatagcccagtgaaaactgaattaatacctcatgttctcctcagacggcatcagacgaggagcaaagattaatcggtcaaggatggggatgcgtctgattaggtagtaggcggggtaacggcccacctagccgacgatcagtaggggttctgagag

SEQ ID NO: 5711 - DNA, 301 bp, Unknown; identical to SEQ ID NO: 5577
  Ascusbbf_4F, encodes 16S rRNA

SEQ ID NO: 5712 - DNA, 301 bp, Unknown
  Ascusbbf_4G, encodes 16S rRNA
agagtttgatcctggctcaggatgaacgctagctacaggcttaacacatgcaagtcgaggggaaacgacagagagtgcttgcactttttgggcgtcgaccggcgaatgggtgagtaacgcgtatccaacctgcccttgactgagggatagcccagtgaaaactgaattaatacctcatatcctcctccgacggcatcagacgaggagtaaagatttatcggtcaaggatggggatgcgtctgattaggtagtaggcggggtaacggcccacctagccgacgatcagtaggggttctgagag

SEQ ID NO: 5713 - DNA, 301 bp, Unknown
  Ascusbbf_4H, encodes 16S rRNA
agagtttgatcctggctcaggatgaacgctagctacaggcttaacacatgcaagtcgaggggaaacgacatagagtgcttgcactttatgggcgtcgaccggcgaatgggtgagtaacgcgtatccaacctgcccttgactgagggatagcccagtggaaactgaattaatacctcatgttctcctcagacggcatcagacgaggagcaaagattaatcggtcaaggatggggatgcgtctgattaggtagtaggcggggtaacggcccacctagccgacgatcagtaggggttctgagag

SEQ ID NO: 5714 - DNA, 301 bp, Unknown
  Ascusbbf_4I, encodes 16S rRNA
agagtttgatcctggctcaggatgaacgctagctacaggcttaacacatgcaagtcgaggggaaacgacagagagtgcttgcacactttgggcgtcgaccggcgaatgggtgagtaacgcgtatccaacctgcccttgactgagggatagcccagtgaaaactgaattaatacctcatgttctcctccgacggcatcagacgaggagtaaagattaatcggtcaaggatggggatgcgtctgattaggtagtaggcggggtaacggcccacctagccgacgatcagtaggggttctgagag

SEQ ID NO: 5715 - DNA, 301 bp, Unknown
  Ascusbbf_4J, encodes 16S rRNA
agagtttgatcctggctcaggatgaacgctagctacaggcttaacacatgcaagtcgaggggaaacgacaaagagtgcttgcacactttgggcgtcgaccggcgaatgggtgagtaacgcgtatccaacctgcccttgactgagggatagcccagtgaaaactgaattaatacctcatgtcctcctccgacggcatcagacgaggagtaaagatttatcggtcaaggatggggatgcgtctgattaggtagtaggcggggtaacggcccacctagccgacgatcagtaggggttctgagag

SEQ ID NO: 5716 - DNA, 301 bp, Unknown
  Ascusbbf_4K, encodes 16S rRNA
agagtttgatcctggctcaggatgaacgctagctacaggcttaacacatgcaagtcgaggggaaacgacatagagtgcttgcactttatgggcgtcgaccggcgaatgggtgagtaacgcgtatccaacctgcccttgaccgagggatagcccagtgaaaactgaattaatacctcatgttctcctcagacggcatcagacgaggagcaaagattaatcggtcaaggatggggatgcgtctgattaggtagtaggcggggtaacggcccacctagccgacgatcagtaggggttctgagag

SEQ ID NO: 5717 - DNA, 300 bp, Unknown
  Ascusbbf_5131A, encodes 16S rRNA
agagtttgatcctggctcaggatgaacgctagctacaggcttaacacatgcaagtcgaggggcagcattaagtcagcttgctgatttagatggcgaccggcgcacgggtgagtaacgcgtatccaacctgccccctacccggggatagccttgcgaaagtaagattaatacccggtgctgttatgattccgcatgggaatataacgaaagattcatcggtaggggatggggatgcgtccgattagcttgttggcggggtaacggcccaccaaggcgacgatcggtaggggttctgagagg

SEQ ID NO: 5718 - DNA, 300 bp, Unknown
  Ascusbbf_5131B, encodes 16S rRNA
agagtttgatcatggctcaggatgaacgctggcggcgtgcttaacacatgcaagtcgaacgaagcaacttattacgatcccttcggggtgacgatttgttgactgagtggcggacgggtgagtaacgcgtgggtaacctaccttgtacagggggacaacagttggaaacgactgctaataccgcataagcgcacagcttcgcatgaagcagtgtgaaaagttttttcggtacaagatggacccgcgtctgattagctagttggtgaggtaacggcccaccaaggcgacgatcagtagccg

SEQ ID NO: 5719 - DNA, 300 bp, Unknown
  Ascusbbf_5131C, encodes 16S rRNA
agagtttgatcatggctcaggatgaacgctagctacaggcttaacacatgcaagtcgaggggcagcattaagtcagcttgctgatttagatggcgaccggcgcacgggtgagtaacgcgtatccaacctgccccctacccggggatagccttgcgaaagtaagattaatacccggtgctgttatgattccgcatgggaatataacgaaagattcatcggtaggggatggggatgcgtccgattagcttgttggcggggtaacggcccaccaaggcgacgatcggtagggggtctgagagg

SEQ ID NO: 5720 - DNA, 300 bp, Unknown
  Ascusbbf_5131D, encodes 16S rRNA
agagtttgatcatggctcaggatgaacgctagctacaggcttaacacatgcaagtcgaggggcagcattagattagcttgctaatctagatggcgaccggcgcacgggtgagtaacgcgtatccaacctgccccctacccggggatagccttgcgaaagtaagattaatacccggtgctgttatgcttccgcatgggaatataacgaaagattcatcggtaggggatggggatgcgtccgattagcttgttggcggggtaacggcccaccaaggcgacgatcggtaggggttctgagagg

SEQ ID NO: 5721 - DNA, 300 bp, Unknown
  Ascusbbf_5131E, encodes 16S rRNA
agagtttgatcctggctcaggatgaacgctagctacaggcttaacacatgcaagtcgaggggcagcattaagtcagcttgctgatttagatggcgaccggcgcacgggtgagtaacgcgtatccaacctgccccctacccggggatagccttgcgaaagtaagattaatacccggtgcagttatgattccgcatgggaatataacgaaagattcatcggtaggggatggggatgcgtccgattagcttgttggcggggtaacggcccaccaaggcgacgatcggtaggggttctgagagg

SEQ ID NO: 5722 - DNA, 300 bp, Unknown; identical to SEQ ID NO: 5718
  Ascusbbf_5131F, encodes 16S rRNA

SEQ ID NO: 5723 - DNA, 300 bp, Unknown
  Ascusbbf_5131G, encodes 16S rRNA
agagtttgatcctggctcaggatgaacgctagctacaggcttaacacatgcaagtcgaggggcagcattaaggaagcttgctttcttagatggcgaccggcgcacgggtgagtaacgcgtatccaacctgccccctacccggggatagccttgcgaaagtaagattaatacccggtgcagttatgattccgcatgggaatataacgaaagattcatcggtaggggatggggatgcgtccgattagcttgttggcggggtaacggcccaccaaggcgacgatcggtaggggttctgagagg

SEQ ID NO: 5724 - DNA, 300 bp, Unknown
  Ascusbbf_5131H, encodes 16S rRNA
agagtttgatcatggctcaggatgaacgctagctacaggcttaacacatgcaagtcgaggggcagcattaagtcagcttgctgatttagatggcgaccggcgcacgggtgagtaacgcgtatccaacctgccccctacccggggatagccttgcgaaagtaagattaatacccggtgctgttatgattccgcatgggaatataacgaaagattcatcggtaggggatggggatgcgtccgattagcttgttggcggggtaacggcccaccaaggcgacgatcggtaggggttctgagagg

SEQ ID NO: 5725 - DNA, 300 bp, Unknown
  Ascusbbf_8600A, encodes 16S rRNA
agagtttgatcctggctcaggacgaacgctggcggcgtgcctaacacatgcaagtcgaacggagctagaaagcttgctttttagcttagtggcggacgggtgagtaatgcgtgagcaacctgcctgtcagtgggggataacttccggaaacggacgctaataccgcatatagtacataatccgcatggataagtgtatgaaaggagcaatccgctgatagatgggctcacgtccgattagtttgttggtggggtaatggcctaccaagactgcgatcggtagccgggctgagaggctgaa

SEQ ID NO: 5726 - DNA, 300 bp, Unknown
  Ascusbbf_8600B, encodes 16S rRNA
agagtttgatcatggctcaggacgaacgctggcggcgtgcctaacacatgcaagtcgaacggagctagaaagcttgctttttagcttagtggcggacgggtgagtaatgcgtgagcaacctgcctgtcagtgggggataacttccggaaacggacgctaataccgcatatagtacataatccgcatggataagtgtatgaaaggagcaatccgctgatagatgggctcacgtccgattagtttgttggtggggtaatggcctaccaagactgcgatcggtagccgggctgagaggctgaa

SEQ ID NO: 5727 - DNA, 299 bp, Unknown
  Ascusbbf_1273A, encodes 16S rRNA
agagtttgatcatggctcaggatgaacgctggcggcgtgcttaacacatgcaagttgtgcggtttctttcgaatgagacttcggtggattttggaagagatagcagcggacgggtgagtaaagcacaaggacgtgccctgaggcgggggacaactacgggaaaccgtagctaataccccgtaagccgagaggtgaaagcagcaatgcgccgaaggagcgacttgtgtcctatcaggtagttggtgaggcaacggctcaccaagccgaagacgggtagccggactgagaggttgtacggc

SEQ ID NO: 5728 - DNA, 299 bp, Unknown
  Ascusbbf_1273B, encodes 16S rRNA
agagtttgatcatggctcaggatgaacgctggcggcgtgcttaacacatgcaagttgtgcggtttctttcaaatgagacttcggtggattttggaagagatagcagcggacgggtgagtaaagcacaaggacgtgccctgaggcgggggacaactacgggaaaccgtagctaataccccgtaagccgagaggtgaaagcagcaatgcgccgaaggagcgacttgtgtcctatcaggtagttggtgaggcaacggctcaccaagccgaagacgggtagccggactgagaagttgtacggc

SEQ ID NO: 5729 - DNA, 299 bp, Unknown
  Ascusbbf_1273C, encodes 16S rRNA
agagtttgatcctggctcaggatgaacgctggcggcgtgcttaacacatgcaagttgtgcggtttctttcgaatgagacttcggtggattttggaagagatagcagcggacgggtgagtaaagcacaaggacgtgccctgaggcgggggacaactacgggaaaccgtagctaataccccgtaagccgagaggtgaaagcagcaatgcgccgaaggagcgacttgtgtcctatcaggtagttggtgaggcaacggctcaccaagccgaagacgggtagccggactgagaggttgtacggc

SEQ ID NO: 5730 - DNA, 299 bp, Unknown
  Ascusbbf_1273D, encodes 16S rRNA
agagtttgatcatggctcaggatgaacgctggcggcgtgcttaacacatgcaagttgggcggtttctttcgaatgagacttcggtggattttggaagagatagcagcggacgggtgagtaaagcacaaggacgtgccctgaggcgggggacaactacgggaaaccgtagctaataccccgtaagccgagaggtgaaagcagcaatgcgccgaaggagcgacttgtgtcctatcaggtagttggtgaggcaacggctcaccaagccgaagacgggtagccggactgagaggttgtacggc

SEQ ID NO: 5731 - DNA, 300 bp, Unknown
  Ascusbbf_39159A, encodes 16S rRNA
agagtttgatcctggctcaggacgaacgctggcggcacgcttaacacatgcaagtcgaacggagataatttgagtttacttagattatcttagtggcggacgggtgagtaacacgtgagcaacctacctttgagagagggatagcttctggaaacggatggtaatacctcataacgtagttttaccgcatgataggactaccaaagatttatcactcaaagatgggctcgcgtctgattagctagatggtgaggtaacggctcaccatggcgacgatcagtagccggactgagaggttga

SEQ ID NO: 5732 - DNA, 300 bp, Unknown
  Ascusbbf_39159B, encodes 16S rRNA
agagtttgatcatggctcaggacgaacgctggcggcacgcttaacacatgcaagtcgaacggagataatttgagtttacttagattatcttagtggcggacgggtgagtaacacgtgagcaacctacctttgagagagggatagcttctggaaacggatggtaatacctcataacgtagttttaccgcatgataggactaccaaagatttatcactcaaagatgggctcgcgtctgattagctagatggtgaggtaacggctcaccatggcgacgatcagtagccggactgagaggttga

SEQ ID NO: 5733 - DNA, 301 bp, Unknown
  Ascusbbf_39159C, encodes 16S rRNA
agagtttgatcctggctcaggacgaacgctggcggcacgcttaacacatgcaagtcgaacggagataatttgagtttacttggattatcttagtggcggacgggtgagtaacacgtgagcaacctgcctttgagagagggatagcttctggaaacggatggtaatacctcataacgtagttttaccgcatgataggactaccaaagatttatcactcaaagatgggctcgcgtctgattagatagttggtgaggtaacggctcaccaagtcgacgatcagtagccggactgagaggttgaa

SEQ ID NO: 5734 - DNA, 300 bp, Unknown
  Ascusbbf_39159D, encodes 16S rRNA
agagtttgatcctggctcaggacgaacgctggcggcacgcttaacacatgcaagtcgaacggagataatttgagtttacttagattatcttagtggcggacgggtgagtaacacgtgagcaacctacctttgagagagggatagcttctggaaacggatggtaatacctcataacgtagttttaccgcatgataggactaccaaagatttatcactcaaagatgggctcgcgtctgattagctagatggtgaggtaacggctcaccatggcgacgatcagtagccgaactgagaggttga

SEQ ID NO: 5735 - DNA, 300 bp, Unknown
  Ascusbbf_318A, encodes 16S rRNA
agagtttgatcctggctcagattgaacgctggcggcaggcttaatacatgcaagtcgaacggtaacggcaggaagcttgcttcctggctgacgagtggcggacgggtgagtaatacctggggagctgcctgaatgagggggacaacacctggaaacgggtgctaataccgcgtaagccctgagggggaaaggccgggcaaccggtcgcattcagatgcgcccaggtgggattagctagttggtggggtaacggcctaccaaggcgacgatctctagctggtctgagaggatgatcagcca

SEQ ID NO: 5736 - DNA, 300 bp, Unknown
  Ascusbbf_318B, encodes 16S rRNA
agagtttgatcctggctcagattgaacgctggcggcaggcttaatacatgcaagtcgaacggtaacggcaggaagcttgcttcctggctgacgagtggcagacgggtgagtaatacctggggagctgcctgaatgagggggacaacacctggaaacgggtgctaataccgcataagccctgagggggaaaggccgggcaaccggtcgcattcagatgcgcccaggtgggattagctagttggtggggtaacggcctaccaaggcgacgatctctagctggtctgagaggatgatcagcca

SEQ ID NO: 5737 - DNA, 300 bp, Unknown
  Ascusbbf_318C, encodes 16S rRNA
agagtttgatcatggctcagattgaacgctggcggcaggcttaatacatgcaagtcgaacggtaacggcaggaagcttgcttcctggctgacgagtggcggacgggtgagtaatacctggggagctgcctgaatgagggggacaacacctggaaacgggtgctaataccgcgtaagccctgagggggaaaggccgggcaaccggtcgcattcagatgcgcccaggtgggattagctagttggtggggtaacggcctaccaaggcgacgatctctagctggtctgagaggatgatcagcca

SEQ ID NO: 5738 - DNA, 300 bp, Unknown; identical to SEQ ID NO: 5550
  Ascusbbf_318D, encodes 16S rRNA

SEQ ID NO: 5739 - DNA, 300 bp, Unknown
  Ascusbbf_318E, encodes 16S rRNA
agagtttgatcatggctcagattgaacgctggcggcaggcttaatacatgcaagtcgaacggtaacagcaggaagcttgcttcctggctgacgagtggcggacgggtgagtaatacctggggagctgcctgaatgagggggacaacacctggaaacgggtgctaataccgcgtaagccctgagggggaaaggctgggcaaccagtcgcattcagatgcgcccaggtgggattagctagttggtggggtaacggcctaccaaggcgacgatctctagctggtctgagaggatgatcagcca

SEQ ID NO: 5740 - DNA, 300 bp, Unknown
  Ascusbbf_7046A, encodes 16S rRNA
agagtttgatcatggctcaggacgaacgctggcggcgtgcttaacacatgcaagtcgagcggtaaggccccttcgggggtacacgagcggcgaacgggtgagtaacacgtgagtaacctgcccctgactctgggataagcctgggaaactgggtctaataccggatatgacctcgtgccgcatggtgtggggtggaaaggtgtttttccggtcagggatgggctcgcggcctatcagcttgttggtggggtaacggcctaccaaggcgatgacgggtagccggcctgagagggcgaccgg

SEQ ID NO: 5741 - DNA, 266 bp, Unknown
  Ascusbbf_1372985A, encodes 16S rRNA
agagtttgatcatggctcaggatgaacgctagcggcaggcttaacacatgcaagtcgaggggcatcgcggggtagcaataccctggcggcgaccggcgaaagggtgcgtaacgcgtgagcgacatgcccgtcacagggggataaccggcggaaacgccgcctaataccccatatgaggccaggccacatggccgggccttgaaagtcaaggcggtgacggattggctcgcgtccgattagccagttggcggggcaacggcccacca

SEQ ID NO: 5742 - DNA, 300 bp, Unknown; identical to SEQ ID NO: 5417
  Ascusbbf_1372985B, encodes 16S rRNA

SEQ ID NO: 5743 - DNA, 261 bp, Unknown
  Ascusbbf_1372985C, encodes 16S rRNA
agagtttgatcctggctcaggatgaacgctagctacaggcttaacacatgcaagtcgaggggcatcgcggggtagcaataccctggcggcgaccggcgaaagggtgcgtaacgcgtgagcgacatgcccgtcacagggggataaccggcggaaacgccgcctaataccccatatgaggccaggccacatggctgggtcttgaaagtcaaggcggtgacggattggctcgcgtccgattagccagttggcggggcaacggcc

SEQ ID NO: 5744 - DNA, 299 bp, Unknown
  Ascusbbf_1372985D, encodes 16S rRNA
agagtttgatcctggctcaggatgaacgctagcggcaggcttaacacatgcaagtcgaggggcatcgcggggtagcaataccctggcggcgaccggcgaaagggtgcgtaacgcgtgagcgacatgcccgtcacagggggataaccggcggaaacgccgcctaataccccatatgaggccaggccacatggctgggtcttgaaagtcaaggcggtgacggattggctcgcgtccgattagccagttggcggggcaacggcccaccaaggcgacgatcggtaggggttctgagaggaagg

SEQ ID NO: 5745 - DNA, 299 bp, Unknown
  Ascusbbf_1372985E, encodes 16S rRNA
agagtttgatcatggctcaggatgaacgctagcggcaggcttaacacatgcaagtcgaggggcatcgcggggtagcaataccctggcggcgaccggcgaaagggtgcgtaacgcgtgagcgacatgcccgtcacagggggataaccggcggaaacgccgcctaataccccatatgaggccaggccacatggctgggtcttgaaagtcaaggcggtgacggattggctcgcgtccgattagccagttggcggggcaacggcccaccaaggcgacgatcggtaggggttctgagaggaagg

SEQ ID NO: 5746 - DNA, 299 bp, Unknown
  Ascusbbf_1372985F, encodes 16S rRNA
agagtttgatcctggctcaggatgaacgctagcggcaggcttaacacatgcaagtcgaggggcatcgcggggtagcaataccctggcggcgaccggcgaaagggtgcgtaacgcgtgagcgacatgcccgtcacagggggataaccggcggaaacgccgcctaataccccatatgaggccaggccacatggctgggtcttgaaagtcaaggcggcgacggattggctcgcgtccgattagccagttggcggggcaacggcccaccaaggcgacgatcggtaggggttctgagaggaagg

SEQ ID NO: 5747 - DNA, 261 bp, Unknown
  Ascusbbf_1372985I, encodes 16S rRNA
agagtttgatcatggctcaggatgaacgctagcggcaggcttaacacatgcaagtcgaggggcatcgcggggtagcaataccctggcggcgaccggcgaaagggtgcgtaacgcgtgagcgacatgcccgtcacagggggataaccggcggaaacgccgcctaataccccatatgaggccaggccacatggccgggccttgaaagtcaaggcggtgacggattggctcgcgtccgattagccagttggcgggggaacggcc

SEQ ID NO: 5748 - DNA, 301 bp, Unknown
  Ascusbbf_1372985L, encodes 16S rRNA
agagtttgatcatggctcagattgaacgctggcggcaggcctaatacatgcaagtcggacggtaacataagaaaagcttgcttttcttgatgacgagtggcggacgggtgagtaagatttgggaaactacctgatagagggggacaacagttggaaacgactgctaataccgcatacaacctcagggtgaaagaagaaattcgctatcagatgtgcccaaacgggattagctagtaggtgaggtaaaggctcacctaggcgacgatctctagctggtctgagaggatgatcagccacattg

SEQ ID NO: 5749 - DNA, 269 bp, Unknown
  Ascusbbf_1372985M, encodes 16S rRNA
agagtttgatcctggctcaggatgaacgctagcggcaggcttaacacatgcaagtcgaggggcatcgcggggtagcaataccctggcggcgaccggcgaaagggtgcgtaacgcgtgagcgacatgcccgtcacagggggataaccggcggaaacgccgcctaataccccatatgaggccaggccacatggctgggtcttgaaagtcaaggcggtgacggattggctcgcgtccgattagccagttggcggggcaacggcccacccagg

SEQ ID NO: 5750 - DNA, 253 bp, Unknown
  Ascusbbf_1372985N, encodes 16S rRNA
agagtttgatcctggctcaggatgaacgctagcggcaggcttaacacatgcaagtcgaggggcatcgcggggtagcaataccctggcggcgaccggcgaaagggtgcgtaacgcgtgagcgacatgcccgtcacagggggataaccggcggaaacgccgcctaataccccatatgaggccaggccacatggccgggccttgaaagtcaaggcggtgacggattggctcgcggccggttagccaggtggcgggg

SEQ ID NO: 5751 - DNA, 264 bp, Unknown
  Ascusbbf_1372985O, encodes 16S rRNA
agagtttgatcatggctcaggatgaacgctagcggcaggcttaacacatgcaagtcgaggggcatcgcggggtagcaataccctggcggcgaccggcgaaagggtgcgtaacgcgtgagcgacatgcccgtcacagggggataaccggcggaaacgccgcctaataccccatatgaggccaggccacatggctgggtcttgaaagtcaaggcggtgacggattggctcgcgtccgattagccagttggcgggggaacggcccac

SEQ ID NO: 5752 - DNA, 253 bp, Unknown
  Ascusbbf_1372985P, encodes 16S rRNA
agagtttgatcctggctcaggatgaacgctagcggcaggcttaacacatgcaagtcgaggggcatcgcggggtagcaataccctggcggcgaccggcgaaagggtgcgtaacgcgtgagcgacatgcccgtcacagggggataaccggcggaaacgccgcctaataccccatatgaggccaggccacatggccgggccttgaaagtcaaggcggtgacggatttgctcgcgtccgattagccagttggcgggg

SEQ ID NO: 5753 - DNA, 266 bp, Unknown
  Ascusbbf_1372985Q, encodes 16S rRNA
agagtttgatcctggctcaggatgaacgctagcggcaggcttaacacatgcaagtcgaggggcatcgcggggtagcaataccctggcggcgaccggcgaaagggtgcgtaacgcgtgagcgacatgcccgtcacagggggataaccggcggaaacgccgcctaataccccatatgaggccaggccacatggccgggccttgaaagtcaaggcggtgacggattggctcgcgtccgattagcccgttggcggggcaacggcccacca

SEQ ID NO: 5754 - DNA, 253 bp, Unknown
  Ascusbbf_1372985R, encodes 16S rRNA
agagtttgatcctggctcaggatgaacgctagcggcaggcttaacacatgcaagtcgaggggcatcgcggggtagcaataccctggcggcgaccggcgaaagggtgcgtaacgcgtgagcgacatgcccgtcacagggggataaccggcggaaacgccgcctaataccccatatgaggccaggccacatggccgggccttgaaagtcaaggcggtgacggattggctcgcggccgattagccagtttgcgggg

SEQ ID NO: 5755 - DNA, 299 bp, Unknown
  Ascusbbf_1372985S, encodes 16S rRNA
agagtttgatcatggctcaggatgaacgctagcggcaggcttaacacatgcaagtcgaggggcatcgcggggtagcaataccctggcggcgaccggcgaaagggtgcgtaacgcgtgagcgacatgcccgtcacagggggataaccggcggaaacgccgcctaataccccatatgaggccaggccacatggccgggccttgaaagtcaaggcggtgacggattggctcgcgtccgattagccagttggcggggcaacggcccaccaaggcgacgatcggtaggggttctgagaggaagg

SEQ ID NO: 5756 - DNA, 299 bp, Unknown
  Ascusbbf_1372985T, encodes 16S rRNA
agagtttgatcctggctcaggatgaacgctagcggcaggcttaacacatgcaagtcgaggggcatcgcggggtagcaataccctggcggcgaccggcgaaagggtgcgtaacgcgtgagcgacatgcccgtcacagggggataaccggcggaaacgccgcctaataccccatatgaggccaggccacatggccgggccttgaaagtcaaggcggtgacggattggctcgcgtccgattagccagttggcggggcaacggcccaccaaggcgacgatcggtaggggttctgagaggaagg

SEQ ID NO: 5757 - DNA, 301 bp, Unknown
  Ascusbbf_121971A, encodes 16S rRNA
agagtttgatcatggctcaggatgaacgctagcggcaggcttaacacatgcaagtcgaggggcaacgcggtgtagcaatacactggcggcgaccggcggaagggtgcgtaacgcgtgagcaacatgcccgtcacagggggataatccatggaaacgtggtctaacaccgcatagattatagggaggacatcctctttataagaaattcgcaagaaggtgacggattggctcgcgtaacattagccagttggtagggtaacggcctaccaaagcgacgatgtttaggggtcctgagagggag

SEQ ID NO: 5758 - DNA, 300 bp, Unknown
  Ascusbbf_5251A, encodes 16S rRNA
agagtttgatcatggctcagaacgaacgctggcggcgcgtcttaagcatgcaagtcgagcggtaagattggtgcttgcactaatcctagagcggcggactggtgagtaacgcgtgggtgacgtacctctgtgacggggacagctcctagaaataggagataataccggatacgctgcatgttgtcagaggacatgcaggaaaggatcttttgattcgcacagagagcggcccgcgtactattagctagttggtgaggtaacggcccaccaaggcgacgatagttacccggcctaagaggg

SEQ ID NO: 5759 - DNA, 301 bp, Unknown
  Ascusbbf_5251B, encodes 16S rRNA
agagtttgatcatggctcagaacgaacgctggcggcgcgtcttaagcatgcaagtcgagcggtaagattggtgcttgcactaatcctagagcggcggactggtgagtaacgcgtgggtgacgtacctctgtgacggggacagctcctagaaataggagataataccggatacgctgtgtgctgtcagagggcacacaggaaaggatcttttgatccgcacagagagcggcccgcgtactattagctggttggtgaggtaacggcccaccaaggcgacgatagttacccggcctaagagggg

SEQ ID NO: 5760 - DNA, 301 bp, Unknown
  Ascusbbf_5251C, encodes 16S rRNA
agagtttgatcatggctcagaacgaacgctggcggcgcgtcttaagcatgcaagtcgagcggtaagattggtgcttgcactaatcctagagcggcggactggtgagtaacgcgtgggtgacgtacctctgtgacggggacagctcctagaaataggagataataccggatacgctgcatgttgtcagaggacatgcaggaaaggatcttttgattcgcacagagagcggcccgcgtactattagctagttggtgaggtaacggcccaccaaggcgacgatagttacccggcctaagagggg

SEQ ID NO: 5761 - DNA, 300 bp, Unknown
  Ascusbbf_5251D, encodes 16S rRNA
agagtttgatcctggctcagaacgaacgctggcggcgcgtcttaagcatgcaagtcgagcggtaagattggtgcttgcactgatcctagagcggcggactggtgagtaacgcgtgggtgacgtacctctgtgacggggacagctcctagaaataggagataataccggatacgctgtgtgctgtcagagggcacacaggaaaggatcttttgatccgcacagagagcggcccgcgtactattagctggttggtgaggtaacggcccaccaaggcgacgatagttacccggcctaagaggg

SEQ ID NO: 5762 - DNA, 301 bp, Unknown
  Ascusbbf_5251E, encodes 16S rRNA
agagtttgatcctggctcagaacgaacgctggcggcgcgtcttaagcatgcaagtcgagcggtaagattggtgcttgcactaatcctagagcggcggactggtgagtaacgcgtgggtgacgtacctctgtgacggggacagctcctagaaataggagataataccggatacgctgtgtgctgtcagagggcacacaggaaaggatcttttgattcgcacagagagcggcccgcgtactattagctagttggtgaggtaacggcccaccaaggcgacgatagttacccggcctaagagggg

SEQ ID NO: 5763 - DNA, 301 bp, Unknown
  Ascusbbf_5251F, encodes 16S rRNA
agagtttgatcatggctcagaacgaacgctggcggcgcgtcttaagcatgcaagtcgagcggtaagattggtgcttgcactaatcctagagcggcggactggtgagtaacgcgtgggtgacgtacctctgtgacggggacagctcctagaaataggagataataccggatacgctgtgtgcagtcagagtgcacacaggaaaggatcttttgattcgcacagagagcggcccgcgtactattagctagttggtgaggtaacggcccaccaaggcgacgatagttacccggcctaagagggg

SEQ ID NO: 5764 - DNA, 300 bp, Unknown
  Ascusbbf_5251G, encodes 16S rRNA
agagtttgatcatggctcagaacgaacgctggcggcgcgtcttaagcatgcaagtcgagcggtaagattggtgcttgcactaatcctagagcggcggactggtgagtaacgcgtgggtgacgtacctctgtgacggggacagctcctagaaataggagataataccggatacgctgtgtgctgtcagagggtacacaggaaaggatcttttgattcgcacagagagcggcccgcgtactattagctagttggtgaggtaacggcccaccaaggcgacgatagttacccggcctaagaggg

SEQ ID NO: 5765 - DNA, 301 bp, Unknown
  Ascusbbf_100A, encodes 16S rRNA
agagtttgatcctggctcaggatgaacgctagctacaggcttaacacatgcaagtcgaggggaaacgatgagagagcttgctctctcaggcgtcgaccggcgcacgggtgagtaacacgtatccaacctgcctttttccagggaataaccttgcgaaagtaagactaatgccctatgtgtcctttgacggcatcagacgaggacgaaagattcatcggaaagggatggggatgcgcctgattaggcagttggcggggcaacggcccaccaaaccgacgatcagtaggggttctgagaggaa

SEQ ID NO: 5766 - DNA, 300 bp, Unknown
  Ascusbbf_100B, encodes 16S rRNA
agagtttgatcctggctcaggatgaacgctagctacaggcttaacacatgcaagtcgaggggaaacgatgagagagcttgctctctcaggcgtcgaccggcgcacgggtgagtaacacgtatccaacctgcctttttctagggaataaccttgcgaaagtaagactaatgccctatgtgtcctttgacggcatcagacgaggacgaaagatttatcggaagaggatggggatgcgcctgattaggcagttggcggggcaacggcccaccaaaccgacgatcagtaggggttctgagagga

SEQ ID NO: 5767 - DNA, 301 bp, Unknown; identical to SEQ ID NO: 5577
  Ascusbbf_100C, encodes 16S rRNA

SEQ ID NO: 5768 - DNA, 301 bp, Unknown
  Ascusbbf_100D, encodes 16S rRNA
agagtttgatcatggctcaggatgaacgctagctacaggcttaacacatgcaagtcgaggggaaacgatgagagagcttgctctctcaggcgtcgaccggcgcacgggtgagtaacacgtatccaacctgcctttttccagggaataaccttgcgaaagtaagactaatgccctatgtgtcctttgacggcatcagacgaggacgaaagatttatcggaaagggatggggatgcgcctgattaggcagttggcggggtaacggcccaccaaaccgacgatcagtaggggttctgagaggaa

SEQ ID NO: 5769 - DNA, 300 bp, Unknown
  Ascusbbf_100E, encodes 16S rRNA
agagtttgatcctggctcaggatgaacgctagctacaggcttaacacatgcaagtcgaggggaaacgatgagagagcttgctctctcaggcgtcgaccggcgcacgggtgagtaacacgtatccaacctgcctttttccagggaataaccttgcgaaagtaagactaatgccctatgtgtcctttgacggcatcagacgaggacgaaagatttatcggaaagggatggggatgcgcctgattaggcagttggcggggcaacggcccaccaaaccgacgatcagtaggggttctgagagga

SEQ ID NO: 5770 - DNA, 300 bp, Unknown
  Ascusbbf_100F, encodes 16S rRNA
agagtttgatcatggctcaggatgaacgctagctacaggcttaacacatgcaagtcgaggggaaacgatgagagagcttgctctctcaggcgtcgaccggcgcacgggtgagtaacacgtatccaacctgcctttttccagggaataaccttgcgaaagtaagactaatgccctatgtgtccttcgacggcatcagacgaggacgaaagatttatcggaagaggatggggatgcgcctgattaggcagttggcggggcaacggcccaccaaaccgacgatcagtaggggttctgagagga

SEQ ID NO: 5771 - DNA, 300 bp, Unknown
  Ascusbbf_100G, encodes 16S rRNA
agagtttgatcatggctcaggatgaacgctagctacaggcttaacacatgcaagtcgaggggaaacgatgagagagcttgctctctcaggcgtcgaccggcgcacgggtgagtaacacgtatccaacctgcctttttccagggaataaccttgcgaaagtaagactaatgccctatgtgtcctttgacggcatcagacgaggacgaaagatttatcggaagaggatggggatgcgcctgattaggcagttggcggggcaacggcccaccaaaccgacgatcagtaggggttctgagagga

SEQ ID NO: 5772 - DNA, 300 bp, Unknown
  Ascusbbf_20584A, encodes 16S rRNA
agagtttgatcatggctcaggatgaacgctggcggcgtgcctaatacatgcaagtcgaacgaggtgtagcaatacaccgagtggcgaacgggtgagtaacacgtaggtaacctgcccctaagtctgggatacccaggggaaaccttggctaataccggatagcggcggaggggacatcccttccgcacgaaagtcgcgtttgcgacgctttcggatggacctgcggcacattagctagttggcggggcaacggcccaccaaggcgaggatgtgtagccgacctgagagggtgaacggcca

SEQ ID NO: 5773 - DNA, 300 bp, Unknown
  Ascusbbf_20584B, encodes 16S rRNA
agagtttgatcctggctcaggatgaacgctggcggcgtgcctaatacatgcaagtcgaacgaggtgtagcaatacaccgagtggcgaacgggtgagtaacacgtaggtaacctgcccctaagtctgggatacccaggggaaaccttggctaataccggatagcggcggaggggacatcccttccgcacgaaagtcgcgtttgcgacgctttcggatggacctgcggcacattagctagttggcggggcaacggcccaccaaggcgaggatgtgtagccgacctgagagggtgaacggcca

SEQ ID NO: 5774 - DNA, 300 bp, Unknown
  Ascusbbf_4317A, encodes 16S rRNA
agagtttgatcatggctcaggatgaacgctagctacaggcttaacacatgcaagtcgaggggcatcatggagattgcttgcaatttctgatggcgaccggcgcacgggtgagtaacgcgtatccaacctgcctgcaagtagggaatagcccggagaaattcggattaatgccctatgtggccctttgatgacatctgaagagggttaaagattaattgcttgcggatggggatgcgtccgattaggcagacggcggggtaacggcccaccgtgccatcgaacggtaggggttctgagagg

SEQ ID NO: 5775 - DNA, 300 bp, Unknown
  Ascusbbf_4317B, encodes 16S rRNA
agagtttgatcatggctcaggatgaacgctagctacaggcttaacacatgcaagtcgaggggcatcatggagattgcttgcaatttctgatggcgaccggcgcacgggtgagtaacgcgtatccaacctgcctgcaagtagggaatagcccggagaaattcggattaatgccctatgtggccctttgatgacatctgaagagggttaaagattaattgcttgcggatggggatgcgtccgattaggcagacggcggggtaacggcccaccgtgccatcgatcggtaggggttctgagagg

SEQ ID NO: 5776 - DNA, 300 bp, Unknown
  Ascusbbf_4317C, encodes 16S rRNA
agagtttgatcatggctcaggatgaacgctagctacaggcttaacacatgcaagtcgaggggcagcatggagattgcttgcaatctttgatggcgaccggcgcacgggtgagtaacgcgtatccaacctgcctgcaagtagggaatagcccggagaaattcggattaatgccctatgtggccctttgatgacatctgaagagggttaaagattaattgcttgcggatggggatgcgtccgattaggcagacggcggggtaacggcccaccgtgccatcgatcggtaggggttctgagagg

SEQ ID NO: 5777 - DNA, 300 bp, Unknown
  Ascusbbf_4317D, encodes 16S rRNA
agagtttgatcctggctcaggatgaacgctagctacaggcttaacacatgcaagtcgaggggcagcatggagattgcttgcaatctttgatggcgaccggcgcacgggtgagtaacgcgtatccaacctgcctgcaagtagggaatagcccggagaaatccggattaatgtcctatgtggcccttagatgacatctgaagagggttaaagatttatcgcttgcggatggggatgcgtccgattaggcagacggcggggtaacggcccaccgtgccatcgatcggtaggggttctgagagg

SEQ ID NO: 5778 - DNA, 297 bp, Unknown; identical to SEQ ID NO: 5563
  Ascusbbf_4317E, encodes 16S rRNA

SEQ ID NO: 5779 - DNA, 301 bp, Unknown
  Ascusbbf_6A, encodes 16S rRNA
agagtttgatcctggctcaggatgaacgctagctacaggcttaacacatgcaagtcgaggggtaacgacagcgaaagcttgcttttgctgggcgacgaccggcgaatgggtgagtaacgcgtatccaacctgccgcaaagtagggcacagccttgcgaaagtaagattaatgccctatgtgctgttttgaagacatctgatgaacagtaaaggttcaccgctttgcgatggggatgcgtctgattaggttgttggcggggtaacggcccaccaagcccgcgatcagtaggggttctgagag

SEQ ID NO: 5780 - DNA, 301 bp, Unknown
  Ascusbbf_6B, encodes 16S rRNA
agagtttgatcctggctcaggatggacgctagctataggcttaacacatgcaagtcgaggggtaacgacagcgaaagcttgcttttgctgggcgacgaccggcgaatgggtgagtaacgcgtatccaacctgccgcaaagtagggcacagccttgcgaaagtaagattaatgccctatgtgctgtgatgatgacatcagaattgcagtaaaggttcaccgcttcgcgatggggatgcgtctgattaggttgttggcggggtaacggcccaccaagcccgcgatcagtaggggttctgagag

SEQ ID NO: 5781 - DNA, 301 bp, Unknown
  Ascusbbf_6C, encodes 16S rRNA
agagtttgatcatggctcaggatgaacgctagctacaggcttaacacatgcaagtcgaggggtaacgacagcgaaagcttgcttttgctgggcgacgaccggcgaatgggtgagtaacgcgtatccaacctgccgcaaagtagggcacagccttgcgaaagtaagattaatgccctatgtgctgtgatgatgacatcagaattgcagtaaaggttcaccgctttgcgatggggatgcgtctgattaggttgttggcggggtaacggcccaccaagccagcgatcagtaggggttctgagag

SEQ ID NO: 5782 - DNA, 301 bp, Unknown
  Ascusbbf_6D, encodes 16S rRNA
agagttagatcatggctcagggtgaacgctagctacaggcttaacacatgcaagtcgaggggtaacgacagcgaaagcttgcttttgctgggcgacgaccggcgaatgggtgagtaacgcgtatccaacctgccgcaaagtagggcacagccttgcgaaagtaagattaatgccctatgtgctgtgatgaggacatctgaactgcagtaaaggttcaccgctttgcgatggggatgcgtctgattaggttgttggcggggtaacggcccaccaagcccgcgatcagtaggggttctgagag

SEQ ID NO: 5783 - DNA, 301 bp, Unknown
  Ascusbbf_6E, encodes 16S rRNA
agagtttgatcctggctcaggatgaacgctagctacaggcttaacacatgcaagtcgaggggtaacgacagcgaaagcttgcttttgctgggcgacgaccggcgaatgggtgagtaacgcgtatccaacctgccgcaaagtagggcacagccttgcgaaagtaagattaatgccctatgtgctgtgatgatgacatcagaattgcagtaaaggtttaccgctttgcgatggggatgcgtctgattaggttgttggcggggtaacggcccaccaagcccgcgatcagtaggggttctgagag

SEQ ID NO: 5784 - DNA, 301 bp, Unknown
  Ascusbbf_6F, encodes 16S rRNA
agagtttgatcatggctcaggatgaacgctagctacaggcttaacacatgcaagtcgaggggtaacgacagcgaaagcttgcttttgctgggcgacgaccggcgaatgggtgagtaacgcgtatccaacctgccgcaaagtagggcacagccttgcgaaagtaagattaatgccctatgtgctgttttgaagacatctgatgaacagtaaaggttcaccgctttgcgatggggatgcgtctgattaggttgttggcggggtaacggcccaccaagcccgcgatcagtaggggttctgagag

SEQ ID NO: 5785 - DNA, 301 bp, Unknown
  Ascusbbf_6G, encodes 16S rRNA
agagtttgatcatggtcaggatgaacgctagctataggcttaacacatgcaagtcgagggataacgacagcgaaagcttgcttttgctgggcgacgaccggcgaatgggtgagtaacgcgtatccaacctgccgcaaagtagggcacagccttgcgaaagtaagattaatgccctatgtgctgtgatgatgacatcagaattgcagtaaaggttcaccgctttgcgatggggatgcgtctgattaggttgttggcggggtaacggcccaccaagcccgcgatcagtaggggttctgagagg

SEQ ID NO: 5786 - DNA, 301 bp, Unknown; identical to SEQ ID NO: 5489
  Ascusbbf_6H, encodes 16S rRNA

SEQ ID NO: 5787 - DNA, 301 bp, Unknown
  Ascusbbf_6I, encodes 16S rRNA
agatttgatcctggctcaggatgaacgctagctacaggcttaacacatgcaagtcgaggggtaacgacagcgaaagcttgcttttgctggtcgacgaccggcgaatgggtgagtaacgcgtatccaacctgccgcaaagtagggcacagccttgcgaaagtaagattaatgccctatgtgctgtgatgatgacatcagaattgcagtaaaggttcaccgctttgcgatggggatgcgtctgattaggttgttggcggggtaacggcccaccaagcctgcgatcagtaggggttctgagagg

SEQ ID NO: 5788 - DNA, 301 bp, Unknown
  Ascusbbf_6J, encodes 16S rRNA
agagtttgatcatggctcaggatgaacgctagctacaggcttaacacatgcaagtcgaggggtaacgacagcgaaagcttgcttttgctggtcgacgaccggcgaatgggtgagtaacgcgtatccaacctaccgcaaagtagggcacagccttgcgaaagtaaaattaatgccctatgtgctgtgatgatgacatcagaattgcagtaaaggttcaccgctttgcgatggggatgcgtctgattaagttgttggcggggtaacagcccaccaagcctgcgatcagtaggggttctgagag

SEQ ID NO: 5789 - DNA, 300 bp, Unknown
  Ascusbbf_6K, encodes 16S rRNA
agagtttgatcatggctcaggatgaacgctagctacaggcttaacacatgcaagtcgaggggtaacgacagcgaaagcttgcttttgctgggcgacgaccggcgaatgggtgagtaacgcgtatccaacctgccgcaaagtagggcacagccttgcgaaagtaagattaatgccctatgtgctgtgatgaggacatctgaattgcagtaaaggttcaccgctttgcgatggggatgcgtctgattaggttgttggcggggtaacggcccaccaagcccgcgatcagtaggggttctgaga

SEQ ID NO: 5790 - DNA, 300 bp, Unknown
  Ascusbbf_6L, encodes 16S rRNA
agagtttgatcatggctcaggatgaacgctagctacaggcttaacacatgcaagtcgaggggcagcatatagatagcttgctatttatgatggcgaccggcgcacgggtgagtaacgcgtatccaaccttccctatactagagaatagcccggcgaaagtcggattaatgctctatgttcttctttgatggcatctgacgagaagcaaaggtttaccggtataggatggggatgcgtctgattaggttgttggcggggtaacggcccaccaagcctacgatcagtaggggttctgagagg

SEQ ID NO: 5791 - DNA, 300 bp, Unknown
  Ascusbbf_19022A, encodes 16S rRNA
agagtttgatcatggctcaggatgaacgctggcggcgtgcctaatacatgcaagtcgagcgagaaattaagaagaagcgttttcgaacaattcatcttaatggaaagcggcggacgggtgagtaacgcgtaggcaacctgcccttagcagagggatagccattggaaacgatgattaaaacctcataacgctgagataacacatgttatctttgccaaagatttatcggctaaggatgggcctgcgtctgattaactagttggtgaggtaacggctcaccaaggtgacgatcagtagccg

SEQ ID NO: 5792 - DNA, 300 bp, Unknown
  Ascusbbf_19022B, encodes 16S rRNA
agagtttgatcctggctcaggatgaacgctggcggcgtgcctaatacatgcaagtcgagcgagaaattaagaagaagcgttttcgaacaattcatcttaatggaaagcggcggacgggtgagtaacgcgtaggcaacctgcccttagcagagggatagccattggaaacgatgattaaaacctcataacgctgagataacacatgttatctttgccaaagatttatcggctaaggatgggcctgcgtctgattaactagttggtgaggtaacggctcaccaaggtgacgatcagtagccg

SEQ ID NO: 5793 - DNA, 300 bp, Unknown
  Ascusbbf_19022C, encodes 16S rRNA
agagtttgatcatggctcaggatgaacgctggcggcgtgcctaatacatgcaagtcgagcgagaaattaagaagaagcgttttcgaacaattcatcttaatggaaagcggcggacgggtgagtaacgcgtaggcaacctgcccttagcagagggatagccattggaaacgatgattaaaacctcataacgctgagataacacatgttatctttgccaaagatttgtcggctaaggatgggcctgcgtctgattaactagttggtgaggtaacggctcaccaaggtgacgatcagtagccg

SEQ ID NO: 5794 - DNA, 300 bp, Unknown
  Ascusbbf_2624A, encodes 16S rRNA
agagtttgatcctggctcaggatgaacgctggcggcgtgcttaacacatgcaagtcgaacgaagcaatttctcacgatcccttcggggtgacgagttattgactgagtggcggacgggtgagtaacgcgtgggtaacctaccttgtacagggggacaacagttggaaacgactgctaataccgcataagcgcacagcttcgcatgaagcagtgtgaaaagttttttcggtacaagatggacccgcgtctgattagctagttggtgaggtaacggctcaccaaggcgacgatcagtagccg

SEQ ID NO: 5795 - DNA, 300 bp, Unknown
  Ascusbbf_2624B, encodes 16S rRNA
agagtttgatcctggctcaggatgaacgctggcggcgtgcttaacacatgcaagtcgaacgaagcaatttattacgatcccttcggggtgacgatttattgactgagtggcggacgggtgagtaacgcgtgggtaacctaccttgtacagggggataacagttggaaacgactgctaataccgcataagcgcacagcttcgcatgaagcagtgtgaaaagtttttcggtacaagatggacccgcgtctgattagctagttggtgaggtaacggcccaccaaggcgacgatagttacccgg

SEQ ID NO: 5796 - DNA, 300 bp, Unknown
  Ascusbbf_2624C, encodes 16S rRNA
agagtttgatcctggctcaggatgaacgctggcggcgtgcttaacacatgcaagtcgaacgaagcaatttattacaatcccttcggggtgacgatttattgactgagtggcggacgggtgagtaacgcgtgggtaacctaccttgtacagggggataacagttggaaacgactgctaataccgcataagcgcacagcttcgcatgaagcagtgtgaaaagttttttcggtataagatggacccgcgtctgattagctagttggtgaggtaacggcccaccaaggcgacgatcagtagccg

SEQ ID NO: 5797 - DNA, 300 bp, Unknown
  Ascusbbf_2624D, encodes 16S rRNA
agagtttgatcctggctcaggatgaacgctggcggcgtgcttaacacatgcaagtcgaacgaagcaatttattacgatcccttcggggtgacgatttattgactgagtggcggacgggtgagtaacgcgtgggtaacctaccttgtacagggggataacagttggaaacgactgctaataccgcataagcgcacagcttcgcatgaagcagtgtgaaaagttttttcggtataagatggacccgcgtctgattagctagttggtgaggtaacggcccaccaaggcgacgatcagtagccg

SEQ ID NO: 5798 - DNA, 300 bp, Unknown
  Ascusbbf_2624E, encodes 16S rRNA
agagtttgatcatggctcaggatgaacgctggcggcgtgcttaacacatgcaagtcgaacgaagcaacttatcacgatcccttcggggtgacgatttgttgactgagtggcggacgggtgagtaacgcgtgggtaacctaccttgtacagggggacaacagttggaaacgactgctaataccgcataagcgcacagcttcgcatgaagcagtgtgaaaagttttttcggtacaagatggacccgcgtctgattagctagttggtgaggtaacggcccaccaaggcgacgatcagtagccg

SEQ ID NO: 5799 - DNA, 300 bp, Unknown
  Ascusbbf_2624F, encodes 16S rRNA
agagtttgatcatggctcaggatgaacgctggcggcgtgcttaacacatgcaagtcgaacgaagcaatttctcacgatcccttcggggtgacgagttattgactgagtggcggacgggtgagtaacgcgtgggtaacctaccttgtacagggggacaacagttggaaacgactgctaataccgcataagcgcacagcttcgcatgaagcagtgtgaaaagttttttcggtacaagatggacccgcgtctgattagctagttggtgaggtaacggctcaccaaggcgacgatcagtagccg

SEQ ID NO: 5800 - DNA, 300 bp, Unknown
  Ascusbbf_2624G, encodes 16S rRNA
agagtttgatcatggctcaggatgaacgctggcggcgtgcttaacacatgcaagtcgaacgaagcaatttattacgatcccttcggggtgacgatttattgactgagtggcggacgggtgagtaacgcgtgggtaacctaccttgtacagggggataacagttggaaacgactgctaataccgcataagcgcacagcttcgcatgaagcagtgtgaaaagttttttcggtataagatggacccgcgtctgattagctagttggtgaggtaacggcccaccaaggcgacgatcagtagccg

SEQ ID NO: 5801 - DNA, 301 bp, Unknown
  Ascusbbf_3427A, encodes 16S rRNA
agagtttgatcctggctcaggatgaacgctagcggcaggcttaacacatgcaagtcgaggggtaacaggggatgtagcaatacatcctgctgacgaccggcgcacaggtgcgtaacgcgtatgcaacctgcccgcaacaggggtataacggagtgaaaattccactaatcccccatattgtcattaggccgcatggctttatgacgaaaggttattctggttgcggatgggcatgcgtgacattaggtagttggcggggtaacggcccaccaagccgacgatgtctaggggagctgagagg

SEQ ID NO: 5802 - DNA, 301 bp, Unknown; identical to SEQ ID NO: 5448
  Ascusbbf_3427B, encodes 16S rRNA

SEQ ID NO: 5803 - DNA, 301 bp, Unknown
  Ascusbbf_3427C, encodes 16S rRNA
agagtttgatcctggctcaggatgaacgctagcggcaggcttaacacatgcaagtcgaggggtaacaggggatgtagcaatacatcctgctgacgaccggcgcacgggtgcgtaacgcgtatgcaacctgcccgcaacaggggtataacggagtgaaaattccactaatcccccatattgtcattaggccgcatggctttatgacgaaaggttattctggttgcggatgggcatgcgtgacattaggtagttggcggggtaacggcccaccaagccgacgatgtctaggggagctgagagg

SEQ ID NO: 5804 - DNA, 301 bp, Unknown
  Ascusbbf_3427D, encodes 16S rRNA
agagtttgatcatggctcaggatgaacgctagcggcaggcttaacacatgcaagtcgaggggtaacaggggatgtagcaatacatcctgctgacgaccggcgcacgggtgcgtaacgcgtatgcaacctgcccgcaacaggggtataacggagtgaaaattccactaatcccccatattgtcattaggccgcatggccggatgacgaaaggttattctggttgcggatgggcatgcgtgacattaggtagttggcggggtaacggcccaccaagccgacgatgtctaggggagctgagagg

SEQ ID NO: 5805 - DNA, 300 bp, Unknown
  Ascusbbf_3427E, encodes 16S rRNA
agatttgatcctggctcaggatgaacgctagcggcaggcttaacacatgcaagtcgaggggtaacaggggatgtagcaatacgtcctgctgacgaccggcgcacgggtgcgtaacgcgtatgcaacctgcccgcaacaggggtataacggagtgaaaattccactaatcccccatattgtcattaggccgcatggctttatgacgaaaggttattctggttgcggatgggcatgcgtgacattaggtagttggcggggtaacggcccaccaagccgacgatgtctaggggagctgagagg

SEQ ID NO: 5806 - DNA, 300 bp, Unknown
  Ascusbbf_5005A, encodes 16S rRNA
agagtttgatcatggctcaggatgaacgctagctacaggcttaacacatgcaagtcgaggggcagcattgagatagcttgctatttcagatggcgaccggcgcacgggtgagtaacgcgtatccaacctggcccgtagtagggaacagcccggcgaaagtcggattaatgccctatgttctccgacgaagacatctgagttggagcaaagattcatcgctacgggatggggatgcgtctgattaggtagtaggcggggtaacggcccacctagccaacgatcagtaggggttctgagagg

SEQ ID NO: 5807 - DNA, 301 bp, Unknown; identical to SEQ ID NO: 5537
  Ascusbbf_5005B, encodes 16S rRNA

SEQ ID NO: 5808 - DNA, 300 bp, Unknown
  Ascusbbf_69A, encodes 16S rRNA
agagtttgatcatggctcaggatgaacgctagctacaggcttaacacatgcaagtcgaggggcagcattatcgaagcttgctttgatagatggcgaccggcgcacgggtgagtaacgcgtatccaaccttccctatagtagagaatagcccggcgaaagtcggattaatgctctatgttgtatttagaggacatctgaagaataccaaaggtttaccgctataggatggggatgcgtctgattaggtagtaggcggggtaacggcccacctagccgacgatcagtaggggttctgagagg

SEQ ID NO: 5809 - DNA, 300 bp, Unknown
  Ascusbbf_69B, encodes 16S rRNA
agagtttgatcctggctcaggatgaacgctagctacaggcttaacacatgcaagtcgaggggcagcatgatcgaagcttgctttgattgatggcgaccggcgcacgggtgagtaacgcgtatccaaccttccctatagtagagaatagcccggcgaaagtcggattaatgctctatgttgtatttagaagacatctgaagaataccaaaggtttaccgctataggatggggatgcgtctgattaggtagtaggcggggtaacggcccacctagccgacgatcagtaggggttctgagagg

SEQ ID NO: 5810 - DNA, 300 bp, Unknown
  Ascusbbf_69C, encodes 16S rRNA
agagtttgatcctggctcaggatgaacgctagctacaggcttaacacatgcaagtcgaggggcagcataacgaaagcttgcttttgttgatggcgaccggcgcacgggtgagtaacgcgtatccaaccttccctatagtagagaatagcccggcgaaagtcggattaatgctctatgttgtatttagaggacatctgaagaataccaaaggttcaccgctataggatggggatgcgtctgattaggtagtaggcggggtaacggcccacctagccgacgatcagtaggggttctgagagg

SEQ ID NO: 5811 - DNA, 301 bp, Unknown
  Ascusbbf_69D, encodes 16S rRNA
agagtttgatcctggctcaggatgaacgctagctacaggcttaacacatgcaagtcgaggagcagcatgatcgaagcttgctttgattgatggcgaccggcgcacgggtgagtaacgcgtatccaaccttccctatagtagagaatagcccggcgaaagtcggattaatgctctatgttgtatttagaggacatctgaagaataccaaaggttcaccgctataggatggggatgcgtctgattaggttgttggcggggtaacggcccaccaagccgacgatcagtaggggttctgagagga

SEQ ID NO: 5812 - DNA, 300 bp, Unknown
  Ascusbbf_69E, encodes 16S rRNA
agagtttgatcatggctcaggatgaacgctagctacaggcttaacacatgcaagtcgaggggcagcatgatcgaagcttgctttgattgatggcgaccggcgcacgggtgagtaacgcgtatccaaccttccctatagtagagaatagcccggcgaaagtcggattaatgctctatgttgtatttagaggacatctgaagaataccaaaggtttaccgctataggatggggatgcgtctgattaggttgttggcggggtaacggcccaccaagccgacgatcagtaggggttctgagagg

SEQ ID NO: 5813 - DNA, 300 bp, Unknown
  Ascusbbf_69F, encodes 16S rRNA
agagtttgatcatggctcaggatgaacgctagctacaggcttaacacatgcaagtcgaggggcagcatgatcgaagcttgctttgattgatggcgaccggcgcacgggtgagtaacgcgtatccaaccttccctatagtagagaatagcccggcgaaagtcggattaatgctctatgttgtatttagaagacatctgaagaataccaaaggtttaccgctataggatggggatgcgtctgattaggtagtaggcggggtaacggcccacctagccgacgatcagtaggggttctgagagg

SEQ ID NO: 5814 - DNA, 301 bp, Unknown
  Ascusbbf_69G, encodes 16S rRNA
agagtttgatcctggctcaggatgaacgctagctacaggcttaacacatgcaagtcgaggggcagcatgatcgaagcttgctttgattgatggcgaccggcgcacgggtgagtaacgcgtatccaaccttccctatagtagagaatagcccggcgaaagtcggattaatgctctatgttgtatttagaggacatctgaagaataccaaaggtttaccgctataggatggggatgcgtctgattaggttgttggcggggtgacggcccactaagcctacgatcagtaggggttctgagagga

SEQ ID NO: 5815 - DNA, 300 bp, Unknown
  Ascusbbf_69H, encodes 16S rRNA
agagtttgatcctggctcaggatgaacgctagctacaggcttaacacatgcaagtcgaggggcagcattatcgaagcttgctttgatagatggcgaccggcgcacgggtgagtaacgcgtatccaaccttccctatagtagagaatagcccggcgaaagtcggattaatgctctatgttgtatttagaagacatctgaagaataccaaaggtttaccgctataggatggggatgcgtctgattaggtagtaggcggggtaacggcccacctagccgacgatcagtaggggttctgagagg

SEQ ID NO: 5816 - DNA, 301 bp, Unknown
  Ascusbbf_69I, encodes 16S rRNA
agagtttgatcctggctcaggatgaacgctagctacaggcttaacacatgcaagtcgaggggcagcatgatcaaagcttgctttgattgatggcgaccggcgcacgggtgagtaacgcgtatccaaccttccctatagtagaggatagcccggcgaaagtcggattaatactctatgttgtatttagatgacatcagaagaataccaaaggtttaccgctataggatggggatgcgtctgattaggtagtcggcggggtaacggcccaccgagccatcgatcagtaggggttctgagagga

SEQ ID NO: 5817 - DNA, 300 bp, Unknown
  Ascusbbf_69J, encodes 16S rRNA
agagtttgatcatggctcaggatgaacgctagctacaggcttaacacatgcaagtcgaggggcagcattatcgaagcttgctttgatagatggcgaccggcgcacgggtgagtaacgcgtatccaaccttccctatagtagagaatagcccggcgaaagtcggattaatgctctatgttgtatttagaagacatctgaagaataccaaaggtttaccgctataggatggggatgcgtctgattaggtagtaggcggggtaacggcccacctagccgacgatcagtaggggttctgagagg

SEQ ID NO: 5818 - DNA, 300 bp, Unknown
  Ascusbbf_8082A, encodes 16S rRNA
agagtttgatcatggctcaggacgaacgctggcggcgtgcttaacacatgcaagtcgaacggggaattttatctcggtagaattcctagtggcgaacgggtgagtaacgcgtaggcaacctgcccttcagacggggacaacatcccgaaaggggtgctaataccggatacgaagctcctgccgcatgacgggagcttgaaaggcgcaaacaagcgccgctgagggatgggcctgcgtccgattagcttgttggtggggtaacggcccaccaaggcgacgatcggtagccggtctgagagg

SEQ ID NO: 5819 - DNA, 300 bp, Unknown
  Ascusbbf_8082B, encodes 16S rRNA
agagtttgatcctggctcaggacgaacgctggcggcgtgcttaacacatgcaagtcgaacggggaattttatctcggtagaattcctagtggcgaacgggtgagtaacgcgtaggcaacctgcccttcagacggggacaacatcccgaaaggggtgctaataccggatacgaagctcctgccgcatgacgggagcttgaaaggcgcaaacaagcgccgctgagggatgggcctgcgtccgattagcttgttggtggggtaacggcccaccaaggcgacgatcggtagccggtctgagagg

SEQ ID NO: 5820 - DNA, 300 bp, Unknown
  Ascusbbf_8082C, encodes 16S rRNA
agagtttgatcctggctcaggacgaacgctggcggcgtgcttaacacatgcaagtcgaacggggaattctgcttcggtggaattcctagtggcgaacgggtgagtaacgcgtaggcaacctgcccttcagacggggacaacatcccgaaaggggtgctaataccggatacgaagctcctgccgcatgacgggagcttgaaaggcgcaaacaagcgccgctgagggatgggcctgcgtccgattagcttgttggtggggtaacggcccaccaaggcgacgatcggtagccggtctgagagg

SEQ ID NO: 5821 - DNA, 300 bp, Unknown
  Ascusbbf_8082D, encodes 16S rRNA
agagtttgatcatggctcaggacgaacgctggcggcgtgcttaacacatgcaagtcgaacggggaattctgcttcggtggaattcctagtggcgaacgggtgagtaacgcgtaggcaacctgcccttcagacggggacaacatcccgaaaggggtgctaataccggatacgaagctcctgccgcatgacgggagcttgaaaggcgcaaacaagcgccgctgagggatgggcctgcgtccgattagcttgttggtggggtaacggcccaccaaggcgacgatcggtagccggtctgagagg

SEQ ID NO: 5822 - DNA, 301 bp, Unknown
  Ascusbbf_8082E, encodes 16S rRNA
agagtttgatcatggctcagattgaacgctggcggcaggcctaatacatgcaagtcgaacggtaacataagaaaagcttgcttttcttgatgacgagtggcggacgggtgagtaatatttgggaagctacctgatagagggggacaacagttggaaacgactgctaataccgcatacagccttagggtgaaagaagaaattcgctatcagatgtgcccaaatgggattagctagtaggtgaggtaaaggctcacctaggcgacgatctctagctggtctgagaggatgatcagccacattg

SEQ ID NO: 5823 - DNA, 300 bp, Unknown
  Ascusbbf_8082F, encodes 16S rRNA
agagtttgatcatggctcaggacgaacgctggcggcgtgcttaacacatgcaagtcgaacggggaattctgcttcggtagaattcctagtggcgaacgggtgagtaacgcgtaggcaacctgcccttcagacggggacaacatcccgaaaggggtgctaataccggatacgaagctcctgccgcatgacgggagcttgaaaggcgcaaacaagcgccgctgagggatgggcctgcgtccgattagcttgttggtggggtaacggcccaccaaggcgacgatcggtagccggtctgagagg

SEQ ID NO: 5824 - DNA, 300 bp, Unknown
  Ascusbbf_8082G, encodes 16S rRNA
agagtttgatcatggctcaggacgaacgctggcggcgtgcttaacacatgcaagccgaacggggaattctgcttcggtagaattcctagtggcgaacgggtgagtaacgcgtaggcaacctgcccttcagacggggacaacatcccgaaaggggtgctaataccggatacgaagctcctgccgcatgacgggagcttgaaaggcgcaaacaagcgccgctgagggatgggcctgcgtccgattagcttgttggtggggtaacggcccaccaaggcgacgatcggtagccggtctgagagg

SEQ ID NO: 5825 - DNA, 301 bp, Unknown
  Ascusbbf_8082H, encodes 16S rRNA
agagtttgatcatggctcaggatgaacgctagcgacaggcctaacacatgcaagtcgaggggcagcgggattgaagcttgctttaattgccggcgaccggcgcacgggtgcgtaacaggtgtgcaatctgtccatagtcggggaatagcccagcgaaagctggattaatgctccatgtgaatcgagaccgcatgattttgatttgaaacgtaaggactatgggtgagcacgcttctgattagatagttggtgaggtaacggctcaccaagtcgacgatcagtaggggttctgagaggaagg

SEQ ID NO: 5826 - DNA, 298 bp, Unknown; identical to SEQ ID NO: 5480
  Ascusbbf_8082I, encodes 16S rRNA

SEQ ID NO: 5827 - DNA, 301 bp, Unknown
  Ascusbbf_95A, encodes 16S rRNA
agagtttgatcatggctcaggatgaacgctagctacaggcttaacacatgcaagtcgaggggcagcgagaaggaagcttgctttctttgtcggcgaccggcgcacgggtgagtaacgcgtatccaaccttccccttagtagggcatagcccggcgaaagtcggattaacaccctatgttatccgaagaggacatctgaattggattaaaggtttaccgctaagggatggggatgcgtctgattaggtagtaggcggggtaacggcccacctagccgacgatcagtaggggttctgagagga

SEQ ID NO: 5828 - DNA, 300 bp, Unknown
  Ascusbbf_95B, encodes 16S rRNA
agagtttgatcctggctcaggatgaacgctagctacaggcttaacacatgcaagtcgaggggcagcgagaggaaagcttgctttccttgtcggcgaccggcgcacgggtgagtaacgcgtatccaaccttccccttagtagggcatagcccggcgaaagtcggattaacaccctatgttatccgaagaggacatctgaattggattaaaggtttaccgctaagggatggggatgcgtctgattaggtagtaggcggggtaacggcccacctagccgacgatcagtaggggttctgagagg

SEQ ID NO: 5829 - DNA, 299 bp, Unknown
  Ascusbbf_95C, encodes 16S rRNA
agagtttgatcatggctcaggatgaacgctagctacaggcttaacacatgcaagtcgaggggcagcgagaggaaagcttgctttccttgtcggcgaccggcgcacgggtgagtaacgcgtatccaaccttccccttagtagggcatagcccggcgaaagtcggattaacaccctatgttatccgaagaggacatctgaattggattaaaggtttaccgctaagggatggggatgcgtctgattaggtagtaggcggggtaacggcccacctagccgacgatcagtaggggttctgagag

SEQ ID NO: 5830 - DNA, 300 bp, Unknown
  Ascusbbf_95D, encodes 16S rRNA
agagtttgatcctggctcaggatgaacgctagctacaggcttaacacatgcaagtcgaggggcagcgagaaggaagcttgctttctttgtcggcgaccggcgcacgggtgagtaacgcgtatccaaccttccccttagtagggcatagcccggcgaaagtcggattaacaccctatgttatccgaagaggacatctgaattggattaaaggtttaccgctaagggatggggatgcgtctgattaggtagtaggcggggtaacggcccacctagccgacgatcagtaggggttctgagagg

SEQ ID NO: 5831 - DNA, 300 bp, Unknown
  Ascusbbf_95E, encodes 16S rRNA
agagtttgatcatggctcaggatgaacgctagctacaggcttaacacatgcaagtcgaggggcagcgagaagaaagcttgctttctttgtcggcgaccggcgcacgggtgagtaacgcgtatccaaccttccccttagtagggcatagcccggcgaaagtcggattaataccctatgttatccgaagaggacatctgaattggattaaagatttatcgctaagggatggggatgcgtctgattaggtagtaggcggggtaacggcccacctagcctacgatcagtaggggttctgagagg

SEQ ID NO: 5832 - DNA, 300 bp, Unknown
  Ascusbbf_95F, encodes 16S rRNA
agagtttgatcatggctcaggatgaacgctagctacaggcttaacacatgcaagtcgaggggcagcgggaagaaagcttgctttctttgccggcgaccggcgcacgggtgagtaacgcgtatccaaccttccccttagtagggcatagcccggcgaaagtcggattaataccctatgttatccgaagaggacatctgaattggattaaagatttatcgctaagggatggggatgcgtctgattaggtagtaggcggggtaacggcccacctagcctacgatcagtaggggttctgagagg

SEQ ID NO: 5833 - DNA, 300 bp, Unknown
  Ascusbbf_95G, encodes 16S rRNA
agagtttgatcctggctcaggatgaacgctagctacaggcttaacacatgcaagtcgaggggcagcgggaagaaagcttgctttctttgccggcgaccggcgcacgggtgagtaacgcgtatccaaccttccccttagtagggcatagcccggcgaaagtcggattaataccctatgttatccgaagaggacatctgaattggattaaagatttatcgctaagggatggggatgcgtctgattaggtagtaggcggggtaacggcccacctagcctacgatcagtaggggttctgagagg

SEQ ID NO: 5834 - DNA, 300 bp, Unknown
  Ascusbbf_95H, encodes 16S rRNA
agagtttgatcctggctcaggatgaacgctagctacaggcttaacacatgcaagtcgaggggcagcgagaagaaagcttgctttctttgtcggcgaccggcgcacgggtgagtaacgcgtatccaaccttccccttagtagggcatagcccggcgaaagtcggattaataccctatgttatccgaagaggacatctgaattggattaaagatttatcgctaagggatggggatgcgtctgattaggtagtaggcggggtaacggcccacctagcctacgatcagtaggggttctgagagg

SEQ ID NO: 5835 - DNA, 301 bp, Unknown
  Ascusbbf_1136A, encodes 16S rRNA
agagtttgatcatggctcaggatgaacgctggcggcgtgcctaacacatgcaagtcgaacggtgtgatgattgaagttttcggacagatatcattacatagtggcggacgggtgagtaacgcgtggagaacctgcactgtactgggggatagcagctggaaacggctggtaataccgcatgagaccacgggagggcatcctcctgaggcaaaagatttatcggtacaggatggatccgcgtttgattagccagttggcggggtaacggcccaccaaagcgacgatcaatagccggcctgag

SEQ ID NO: 5836 - DNA, 301 bp, Unknown
  Ascusbbf_1136B, encodes 16S rRNA
agagtttgatcctggctcaggatgaacgctggcggcgtgcctaacacatgcaagtcgaacggtgtaatgattgaagttttcggacagatttcattacatagtggcggacgggtgagtaacgcgtggagaacctgcactgtactgggggatagcagctggaaacggctggtaataccgcatgagaccacgggagggcatcctcctgaggcaaaagatttatcggtacaggatggatccgcgtttgattagccagttggcggggtaacggcccaccaaagcgacgatcaatagccggcctgag

SEQ ID NO: 5837 - DNA, 301 bp, Unknown
  Ascusbbf_1136C, encodes 16S rRNA
agagtttgatcatggctcaggatgaacgctggcggcgtgcctaacacatgcaagtcgaacggtgtaatgattgaagttttcggacagatatcattatatagtggcggacgggtgagtaacgcgtggagaacctgcactgtactgggggatagcagctggaaacggctggtaataccgcatgagaccacgggagggcatccttctgaggcaaaagatttatcggtacaggatggatccgcgtttgattagccagttggcggggtaacggcccaccaaagcgacgatcaatagccggcctgag

SEQ ID NO: 5838 - DNA, 301 bp, Unknown
  Ascusbbf_1136D, encodes 16S rRNA
agagtttgatcatggctcaggatgaacgctggcggcgtgcctaacacatgcaagtcgaacggtgtaatgattgaagttttcggacagatttcattacatagtggcggacgggtgagtaacgcgtggagaacctgcactgtactgggggatagcagctggaaacggctggtaataccgcatgagaccacgggagggcatcctcctgaggcaaaagatttatcggtacaggatggatccgcgtttgattagccagttggcggggtaacggcccaccaaagcgacgatcaatagccggcctgag

SEQ ID NO: 5839 - DNA, 301 bp, Unknown
  Ascusbbf_1136E, encodes 16S rRNA
agagtttgatcctggctcaggatgaacgctggcggcgtgcctaacacatgcaagtcgaacggtgtgatgattgaagttttcggacagatatcattacatagtggcggacgggtgagtaacgcgtggagaacctgcactgtactgggggatagcagctggaaacggctggtaataccgcatgagaccacgggagggcatcctcctgaggcaaaagatttatcggtacaggatggatccgcgtttgattagccagttggcggggtaacggcccaccaaagcgacgatcaatagccggcctgag

SEQ ID NO: 5840 - DNA, 301 bp, Unknown
  Ascusbbf_1136F, encodes 16S rRNA
agagtttgatcatggctcaggatgaacgctggcggcgtgcctaacacatgcaagtcgaacggtgtaatgattgaagttttcggacagatatcattacatagtggcggacgggtgagtaacgcgtggagaacctgcactgtactgggggatagcagctggaaacggctggtaataccgcatgagaccacgggagggcatcctcctgaggcaaaagatttatcggtacaggatggatccgcgtttgattagccagttggaggggtaacggcccaccaaggcgacgatcagtagccggtctgag

SEQ ID NO: 5841 - DNA, 300 bp, Unknown
  Ascusbbf_2770A, encodes 16S rRNA
agagtttgatcatggctcaggataaacgccggcggcgtgcctaatacatgcaagtcgaacgaggctcttcggagccgagtggcgtacgggtgagtaacacgttggtaacctgccctccagaccggaataccagagagaaatctctgctaatgccggatgacgtcatatggtcgcaagaccacttgaccaaaggcggcaactgccgcgctgaaggatggacctgcgtcgcattagctagttggcgggataatggcccaccaaggcgaggatgcgtagccgagctgagaggctaaacggcca

SEQ ID NO: 5842 - DNA, 300 bp, Unknown
  Ascusbbf_2770B, encodes 16S rRNA
agagtttgatcctggctcaggataaacgccggcggcgtgcctaatacatgcaagtcgaacgaggctcttcggagccgagtggcgtacgggtgagtaacacgttggtaacctgccctccagaccggaataccagagagaaatctctgctaatgccggatgacgtcatatggtcgcaagaccacttgaccaaaggcggcaactgccgcgctgaaggatggacctgcgtcgcattagctagttggcgggataatggcccaccaaggcgaggatgcgtagccgagctgagaggctaaacggcca

SEQ ID NO: 5843 - DNA, 300 bp, Unknown
  Ascusbbf_2770C, encodes 16S rRNA
agagtttgatcctggctcagaatagacgccggcggcgtgcctaatacatgcaagtcgaacgaggctcttcggagccgagtggcgtacgggtgagtaacacgttggtaacctgccctccagaccggaataccagagagaaatctctgctaatgccggatgacgtcatatggtcgcaagaccacttgaccaaaggcggcaactgccgcgctgaaggatggacctgcgtcgcattagctagttggcgggataatggcccaccaaggcgaggatgcgtagccgagctgagaggctaaacggcca

SEQ ID NO: 5844 - DNA, 298 bp, Unknown; identical to SEQ ID NO: 5480
  Ascusbbf_1629A, encodes 16S rRNA

SEQ ID NO: 5845 - DNA, 299 bp, Unknown
  Ascusbbf_1629B, encodes 16S rRNA
agagtttgatcctggctcaggatgaacgctggcggcgtgcctaatacatgcaagtcgagcgaaccacttcggtggtgagcggcgaacgggtgagtaacacgtaggcgatctgcccatcagacggggacaacgattggaaacgatcgctaataccggataggacgaaagtttaaaggtgcttctggcaccgctgatggatgagcctgcggcgcattagctagttggtagggtaaaggcctaccaaggcgacgatgcgtagccgacctgagagggtgaacggccacactgggactgagaca

SEQ ID NO: 5846 - DNA, 301 bp, Unknown; identical to SEQ ID NO: 5396
  Ascusbbf_1629C, encodes 16S rRNA

SEQ ID NO: 5847 - DNA, 301 bp, Unknown
  Ascusbbf_1629D, encodes 16S rRNA
agagtttgatcatggctcaggatgaacgctggcggcgtgcctaatacatgcaagtcgagcgaaccacttcggtggtgagcggcgaacgggtgagtaacacgtaggtgatctgcccatcagacggggacaacgattggaaacgatcgctaataccggataggacgaaagtttaaaggtgcttctggcaccgctgatggatgagcctgcggcgcattagctagttggtagggtaaaggcctaccaaggcgacgatgcgtagccgacctgagagggtgaacggccacactgggactgagacacg

SEQ ID NO: 5848 - DNA, 301 bp, Unknown
  Ascusbbf_1629E, encodes 16S rRNA
agagtttgatcctggctcaggatgaacgctggcggcgtgcctaatacatgcaagtcgagcgaaccacttcggtggtgagcggcgaacgggtgagtaacacgtaggtgatctgcccatcagacggggacaacgattggaaacgatcgctaataccggataggacgaaagtttaaaggtgcttctggcaccgctgatggatgagcctgcggcgcattagctagttggtagggtaaaggcctaccaaggcgacgatcagtagccggcctgagagggcggacggccacattgggactgagacacg

SEQ ID NO: 5849 - DNA, 301 bp, Unknown
  Ascusbbf_1629F, encodes 16S rRNA
agagtttgatcctggctcaggatgaacgctggcggcgtgcctaatacatgcaagtcgagcgaaccacttcggtggtgagcggcgaacgggtgagtaacacgtaggtgatctgcccatcagacgggggcaacgattggaaacgatcgctaatactggataggacgaaagtttaaaggtgcttctggcaccgctgatggatgagcctgcggcgcattagctagttggtagggtaaaggcctaccaaggcgacgatgcgtagccgacctgagagggtgaacggccacactgggactgagacacg

SEQ ID NO: 5850 - DNA, 301 bp, Unknown
  Ascusbbf_1629G, encodes 16S rRNA
agatttgatcctggctcaggatgaacgctggcggcgtgcctaatacatgcaagtcgagcgaaccacttcggtggtgagcggcgaacgggtgagtaacacgtaggtgatctgcccatcagacggggacaacgattggaaacgatcgctaataccggataggacgaaagtttaaaggtgcttctggcaccgctgatggatgagcctgcggcgcattagctagttggtagggtaaaggcctaccaaggcgacgatgcgtagccgacctgagagggtgaacggccacactgggactgagacacgg

SEQ ID NO: 5851 - DNA, 300 bp, Unknown
  Ascusbbf_1821A, encodes 16S rRNA
agagtttgatcctggctcaggataaacgctggcggcgtgcctaatacatgcaagtcgaggggcagcacggagactgcttgcagtctctggtggcgaccggcggatgggtgagtaacgcgtatccaacctgcccgtgacccggggacagccttccgaaaggaagattaatacccgatgttccggcgtgcgcgcatgcgctgcgccggcaaagtttttctgcggtgacggatggggatgcgtctgattaggctgcaggcggggtaacggcccacctggccatcgatcagtaggggttctgag

SEQ ID NO: 5852 - DNA, 300 bp, Unknown
  Ascusbbf_1821B, encodes 16S rRNA
agagtttgatcatggctcaggatgaacgctagctacaggcttaacacatgcaagtcgaggggcagcacggagactgcttgcagtctctggtggcgaccggcggatgggtgagtaacgcgtatccaacctgcccgtgacccggggacagccttccgaaaggaagattaatacccgatgttccggcgtgcgcgcatgcgctgcgccggcaaagtttttctgcggtgacggatggggatgcgtctgattaggcagcaggcggggtaacggcccacctggccatcgatcagtaggggttctgag

SEQ ID NO: 5853 - DNA, 300 bp, Unknown
  Ascusbbf_1821C, encodes 16S rRNA
agagtttgatcatggctcaggatgaacgctagctacaggcttaacacatgcaagtcgaggggcagcacggagactgcttgcagtctctggtggcgaccggcggatgggcgagtaacgcgtatccaacctgcccgtgacccggggacagccttccgaaaggaagattaatacccgatgttccggcgtgcgcgcatgcgctgcgccggcaaagtttttctgcggtgacggatggggatgcgtctgattaggcagcaggcggggtaacggcccacctggccatcgatcagtaggggttctgag

SEQ ID NO: 5854 - DNA, 300 bp, Unknown
  Ascusbbf_1821D, encodes 16S rRNA
agagtttgatcctggctcaggatgaacgctagctacaggcttaacacatgcaagtcgaggggcagcacggagactgcttgcagtctctggtggcgaccggcggatgggtgagtaacgcgtatccaacctgcccgtgacccggggacagccttccgaaaggaagattaatacccgatgttccggcgtgcgcgcatgcgctgcgccggcaaagtttttctgcggtgacggatggggatgcgtctgattaggcagcaggcggggtaacggcccacctggccatcgatcagtaggggttctgag

SEQ ID NO: 5855 - DNA, 300 bp, Unknown
  Ascusbbf_56782A, encodes 16S rRNA
agagtttgatcatggctcaggatgaacgctagctacaggcttaacacatgcaagtcgaggggcagcatgatcgaagcttgctttgattgatggcgaccggcgcacgggtgagtaacgcgtatccaaccttccctatagtagagaatagcccggcgaaagtcggattaatgctctatgttgtatttagaggacatctgaagaataccaaaggtttaccgctataggatggggatgcgtctgattaggtagtaggcggggtaacggcccacctagccgacgatcagtaggggttctgagagg

SEQ ID NO: 5856 - DNA, 300 bp, Unknown
  Ascusbbf_56782B, encodes 16S rRNA
agagtttgatcatggctcaggatgaacgctagctacaggcttaacacatgcaagtcgaggggcagcatgatcaaagcttgctttgattgatggcgaccggcgcacgggtgagtaacgcgtatccaaccttccctatagtagtggatagcccggcgaaagtcggattaatacactatgttgtatttagaggacatctgaagaataccaaaggtttaccgctataggatggggatgcgtctgattagatagtaggcggggtaacggcccacctagtcgacgatcagtaggggttctgagagg

SEQ ID NO: 5857 - DNA, 300 bp, Unknown
  Ascusbbf_56782C, encodes 16S rRNA
agagtttgatcatggctcaggatgaacgctagctacaggcttaacacatgcaagtcgaggggcagcatgatcaaagcttgctttgattgatggcgaccggcgcacgggtgagtaacgcgtatccaaccttccctatagtagtggatagcccggcgaaagtcggattaatacactatgttgtatttagaggacatctgaagaataccaaaggcttgccgctataggatggggatgcgtctgattagatagtaggcggggtaacggcccacctagtcgacgatcagtaggggttctgagagg

SEQ ID NO: 5858 - DNA, 300 bp, Unknown
  Ascusbbf_92A, encodes 16S rRNA
agagtttgatcctggctcaggatgaacgctggcggcgcgcctaacacatgcaagtcgaacggccggacccacctcggtgggcgaggcagtggcgaacggctgagtaacacgtgggcaacctgcccccctccccgggacagcctcgggaaaccgtgggtaataccggatatgccgccccctccgcatgggaggggcgggaaagctccggcggggggggatgggcccgcggcctgttagcttgttggcggggcaacggcccaccaaggcgactatgggtagctgggttgagagaccgaccag

SEQ ID NO: 5859 - DNA, 300 bp, Unknown
  Ascusbbf_92B, encodes 16S rRNA
agagtttgatcctggctcaggatgaacgctggcggcgcgcctaacacatgcaagtcgaacggccggacccaccccggtgggcgaggcagtggcgaacggctgagtaacacgtgggcaacctgcccccctccccgggacagcctcgggaaaccgtgggtaataccggatgagccgccccctccgcatgggaggggcgggaaagctccggcggggggggatgggcccgcggcctgttagctagttggcggggcaacggcccaccaaggcgactatgggtagctgggttgagagaccgaccag

SEQ ID NO: 5860 - DNA, 300 bp, Unknown
  Ascusbbf_92C, encodes 16S rRNA
agagtttgatcatggctcaggatgaacgctggcggcgcgcctaacacatgcaagtcgaacggccggacccacctcggtgggcgaggcagtggcgaacggctgagtaacacgtgggcaacctgcccccctccccgggacagcctcgggaaaccgtgggtaataccggatactccgccccctccgcatgggaggggcgggaaagctccggcggggggggatgggcccgcggcctgttagctagttggcggggcaacggcccaccaaggcgactatgggtagctgggttgagagaccgaccag

SEQ ID NO: 5861 - DNA, 300 bp, Unknown
  Ascusbbf_92D, encodes 16S rRNA
agagtttgatcctggctcaggatgaacgctggcggcgcgcctaacacatgcaagtcgaacggccggacccacctcggtgggcgaggcagtggcgaacggctgagtaacacgtgggcaacctgcccccctccccgggacagcctcgggaaaccgtgggtaataccggatactccgccccctccgcatgggaggggcgggaaagctccggcggggggggatgggcccgcggcctgttagctagttggcggggcaacggcccaccaaggcgactatgggtagctgggttgagagaccgaccag

SEQ ID NO: 5862 - DNA, 300 bp, Unknown
  Ascusbbf_92E, encodes 16S rRNA
agagtttgatcctggctcaggatgaacgctggcggcgcgcctaacacatgcaagtcgaacggccggacccacctcggtgggcgaggcagtggcgaacggctgagtaacacgtgggcaacctgcccccctccccgggacagcctcgggaaaccgtgggtaataccggatatgccgccccctccgcatgggaggggcgggaaagctccggcggggggggatgggcccgcggcctgttagctagttggcggggcaacggcccaccaaggcgactatgggtagctgggttgagagaccgaccag

SEQ ID NO: 5863 - DNA, 300 bp, Unknown
  Ascusbbf_92F, encodes 16S rRNA
agagtttgatcatggctcaggatgaacgctggcggcgcgcctaacacatgcaagtcgaacggccggacccaccccggtgggcgaggcagtggcgaacggctgagtaacacgtgggcaacctgcccccctccccgggacagcctcgggaaaccgtgggtaataccggatgagccgccccctccgcatgggaggggcgggaaagctccggcggggggggatgggcccgcggcctgttagctagttggcggggcaacggcccaccaaggcgactatgggtagctgggttgagagaccgaccag

SEQ ID NO: 5864 - DNA, 300 bp, Unknown
  Ascusbbf_92H, encodes 16S rRNA
agagtttgataatggctcgggatgaacgctggcggcgcgcctaacacatgcaagtcgaacggccggacccaccccggtgggcgaggcagtggcgaacggctgagtaacacgtgggcaacctgcccccctccccgggacagcctcgggaaaccgtgggtaataccggatgaaccgccccctccgcatgggaggggcgggaaagctccggcggggggggatgggcccgcggcctgttagctagttggcggggcaacggcccaccaaggtgactatgggtagctgggttgagagaccgaccag

SEQ ID NO: 5865 - DNA, 301 bp, Unknown; identical to SEQ ID NO: 5661
  Ascusbbf_92K, encodes 16S rRNA

SEQ ID NO: 5866 - DNA, 300 bp, Unknown
  Ascusbbf_92L, encodes 16S rRNA
agagtttgatcatggctcaggatgaacgctggcggcgcgcctaacacatgcaagtcgaacggccggacccacctcggtgggcgaggcagtggcgaacggctgagtaacacgtgggcaacctgcccccctccccgggacagcctcgggaaaccgtgggtaataccggatactccgccccctccgcatgggaggggcgggaaagctccggcggggggggatgggcccgcggcctgttagctagttggcggggcaacggcccaccaaggcgactatgggtagccggcctgagagggcggacgg

SEQ ID NO: 5867 - DNA, 300 bp, Unknown
  Ascusbbf_118A, encodes 16S rRNA
agagtttgatcctggctcaggatgaacgctagctacaggcttaacacatgcaagtcgaggggcagcatgatttgtgcttgcacagattaatggcgaccggcgcacgggtgagtaacgcgtatccaaccttccctgtactagaggatagcccggcgaaagtcggattaatactctatgttgttcaatgcggacatctaagttgaaccaaaggtttaccggtataggatggggatgcgtctgattaggttgttggcggggtaacggcccaccaagcctacgatcagtaggggttctgagagg

SEQ ID NO: 5868 - DNA, 300 bp, Unknown
  Ascusbbf_118B, encodes 16S rRNA
agagtttgatcatggctcaggatgaacgctagctacaggcttaacacatgcaagtcgaggggcagcatgatttgtgcttgcacagattgatggcgaccggcgcacgggtgagtaacgcgtatccaaccttccctatactagaggatagcccggcgaaagtcggattaatactctatgttgttcaatgcggacatctaagttgaaccaaaggtttaccggtataggatggggatgcgtctgattaggttgttggcggggtaacggcccaccaagcctacgatcagtaggggttctgagagg

SEQ ID NO: 5869 - DNA, 300 bp, Unknown
  Ascusbbf_118C, encodes 16S rRNA
agagtttgatcctggctcaggatgaacgctagctacaggcttaacacatgcaagtcgaggggcagcatgatttgtgcttgcacagattgatggcgaccggcgcacgggtgagtaacgcgtatccaaccttccctatactagaggatagcccggcgaaagtcggattaatactctatgttgttcaatgcggacatctaagttgaaccaaaggtttaccggtataggatggggatgcgtctgattaggttgttggcggggtaacggcccaccaagcctacgatcagtaggggttctgagagg

SEQ ID NO: 5870 - DNA, 300 bp, Unknown
  Ascusbbf_5429A, encodes 16S rRNA
agagtttgatcctggctcagattgaacgctggcggcaggcttaacacatgcaagtcgtacggtaacagagggaagcttgcttctctgctgacgagtggcggacgggtgagtaatgtctgggaagctgcctgcttgagggggatagcggagcgaaagttccgataataccgcgtaagcccgagaggggaaagtgcgggaccgcaaggccgcacgcgagcagatgcgcccagatgggattaggcagttggggaggtaacggctcaccaaaccgatgatctctagctggtttgagaggacaat

SEQ ID NO: 5871 - DNA, 300 bp, Unknown
  Ascusbbf_5429B, encodes 16S rRNA
agagtttgatcatggctcagattgaacgctggcggcaggcttaacacatgcaagtcgtacggtaacagagggaagcttgcttctctgctgacgagtggcggacgggtgagtaatgtctgggaagctgcctgcttgagggggatagcggagcgaaagttccgataataccgcgtaagcccgagaggggaaagtgcgggaccgcaaggccgcacgcgagcagatgcgcccagatgggattaggcagttggggaggtaacggctcaccaaaccgatgatctctagctggtttgagaggacaat

SEQ ID NO: 5872 - DNA, 300 bp, Unknown; identical to SEQ ID NO: 5871
  Ascusbbf_5429C, encodes 16S rRNA

SEQ ID NO: 5873 - DNA, 301 bp, Unknown
  Ascusbbf_5429D, encodes 16S rRNA
agagtttgatcctggctcagattgaacgctggcggcaggcctaatacatgcaagtcgaacggcagcagggggagtgcttgcactccccgctggcgagtggcggacgggtgagtagtgcctgggaagctgcctggcagagggggacaacagctggaaacggctgctgataccgcatattaccccgagggggaaaggagagatccgctgccggatgcgcccaggcgggattagctggttggcggggcaaaggcccaccaaggcgacgatccctagctggtctgagaggatgatcagccacatt

SEQ ID NO: 5874 - DNA, 300 bp, Unknown
  Ascusbbf_3A, encodes 16S rRNA
agagtttgatcctggctcagattgaacgctggcggcaggcttaacacatgcaagtcgtacggtaacagagggaagcttgcttctctgctgacgagtggcggacgggtgagtaatgtctgggaagctgcctgcttgagggggatagcggagcgaaagttccgataataccgcgtaagcccgagaggggaaagtgcgggaccgcaaggccgcacgcgagcagatgcgcccagatgggattaggcagttggggaggtaatggctcaccaaaccgatgatctctagctggtttgagaggacaat

SEQ ID NO: 5875 - DNA, 300 bp, Unknown; identical to SEQ ID NO: 5870
  Ascusbbf_3B, encodes 16S rRNA

SEQ ID NO: 5876 - DNA, 300 bp, Unknown
  Ascusbbf_3C, encodes 16S rRNA
agagtttgatcatggctcagattgaacgctggcggcaggcttaacacatgcaagtcgtacggtaacagagggaagcttgcttctctgctgacgagtggcggacgggtgagtaatgtctgggaagctgcctgcttgagggggatagcggagcgaaagttccgataataccgcgtaagcccgagaggggaaagtgcgggaccgcaaggccgcacgcgagcagatgcgcccagatgggattaggcagttggggaggtaatggctcaccaaaccgatgatctctagctggtttgagaggacaat

SEQ ID NO: 5877 - DNA, 300 bp, Unknown
  Ascusbbf_3D, encodes 16S rRNA
agagtttgatcctggctcagattgaacgctggcggcaggcttaacacatgcaagtcgtacggtaacagagggaagcttgcttctctgctgacgagtggcggacgggtgagtaatgtctgggaagctgcctgcttgagggggatagcggagcgaaagttccgataataccgcgtaagcccgagaggggaaagtgcgggaccgcaaggccgcacgcgagcagatgcgcccagatgggattaggcagttggggaggtaacggctcaccaaaccgatgatccatagccggcctgagagggtgaa

SEQ ID NO: 5878 - DNA, 300 bp, Unknown; identical to SEQ ID NO: 5871
  Ascusbbf_3E, encodes 16S rRNA

SEQ ID NO: 5879 - DNA, 300 bp, Unknown; identical to SEQ ID NO: 5871
  Ascusbbf_3F, encodes 16S rRNA

SEQ ID NO: 5880 - DNA, 299 bp, Unknown
  Ascusbbf_3G, encodes 16S rRNA
agagtttgatcctggctcagattgaacgctggcggcaggcctaacacatgcaagtcgaacggtaacaggaagaagcttgcttctctgctgacgagtggcggacgggtgagtaatgtctgggaagctgcctgcttgagggggatagcggagcgaaagttccgataataccgcgtaagcccgagaggggaaagtgcgggaccgcaaggccgcacgcgagcagatgcgcccagatgggattaggcagttggggaggtaacggctcaccaaaccgatgatctctagctggtttgagaggacga

SEQ ID NO: 5881 - DNA, 300 bp, Unknown
  Ascusbbf_10576A, encodes 16S rRNA
agagtttgatcctggctcaggatgaacgctagctacaggcttaacacatgcaagtcgaggggcagcatgacgatagcttgctattgtcgatggcgaccggcgcacgggtgagtaacgcgtatccaaccttccccatagtagggcatagcccgtagaaatgcggattaataccctatgttttccgaagcagacatctaatttggaacaaaggttcaccgctatgggatggggatgcgtctgattaggttgttggcggggtaacggcccaccaagccatcgatcagtaggggttctgagagg

SEQ ID NO: 5882 - DNA, 301 bp, Unknown; identical to SEQ ID NO: 5661
  Ascusbbf_10576B, encodes 16S rRNA

SEQ ID NO: 5883 - DNA, 300 bp, Unknown
  Ascusbbf_10576C, encodes 16S rRNA
agagtttgatcctggctcaggatgaacgctagctacaggcttaacacatgcaagtcgaggggcagcatgacgatagcttgctattgtcgatggcgaccggcgcacgggtgagtaacgcgtatccaaccttccccatagtagggcatagcccgtagaaatgcggattaataccctatgttttccgaagcagacatctaattcggaacaaaggttcaccgctatgggatggggatgcgtctgattaggttgttggcggggtaacggcccaccaagccatcgatcagtaggggttctgagagg

SEQ ID NO: 5884 - DNA, 301 bp, Unknown
  Ascusbbf_10576D, encodes 16S rRNA
agagtttgatcctggctcaggatgaacgctagctacaggcttaacacatgcaagtcgaggggcagcatgacgatagcttgctattgtcgatggcgaccggcgcacgggtgagtaacgcgtatccaaccttccccatagtagggcatagcccgtagaaatgcggattaataccctatgttttccgaagcagacatctaatttggaacaaaggttcaccgctatgggatggggatgcgtctgattaggttgcaggcggggtaacggcccacctggccatcgatcagtaggggttctgagagga

SEQ ID NO: 5885 - DNA, 300 bp, Unknown
  Ascusbbf_10576E, encodes 16S rRNA
agagtttgatcatggctcaggatgaacgctagctacaggcttaacacatgcaagtcgaggggcagcatgacgatagcttgctatcgtcgatggcgaccggcgcacgggtgagtaacgcgtatccaaccttccccatagtagggcatagcccgtagaaatgcggattaataccctatgttttccgaagcagacatctaatttggaacaaaggttcaccgctatgggatggggatgcgtctgattaggttgttggcggggtaacggcccaccaagccttcgatcagtaggggttctgagagg

SEQ ID NO: 5886 - DNA, 300 bp, Unknown
  Ascusbbf_729A, encodes 16S rRNA
agagtttgatcctggctcaggatgaacgctagctacaggcttaacacatgcaagtcgaggggcatcagggtctgtgcttgcacagattgctggcgaccggcgcacgggtgagtaacgcgtatccaaccttccccttagtagaggatagcccggcgaaagtcggattaatactctatgttgttcaatgcggacatctaagttgaaccaaaggtttaccgctaagggatggggatgcgtctgattaggtagtaggcggggtaacggcccacctagccgacgatcagtaggggttctgagagg

SEQ ID NO: 5887 - DNA, 300 bp, Unknown
  Ascusbbf_729B, encodes 16S rRNA
agagtttgatcctggctcaggatgaacgctagctacaggcttaacacatgcaagtcgaggggcatcagggtctgtgcttgcacagattgctggcgaccggcgcacgggtgagtaacgcgtatccaaccttccccttagtagaggatagcccggcgaaagtcggattaatactctatgttgttcaatgcggacatctaagttgaaccaaaggtttaccgctaagggatggggatgcgtctgattaggtagtaggcggggtaacggcccacctagccaacgatcagtaggggttctgagagg

SEQ ID NO: 5888 - DNA, 300 bp, Unknown
  Ascusbbf_729C, encodes 16S rRNA
agagtttgatcatggctcaggatgaacgctagctacaggcttaacacatgcaagtcgaggggcatcaggatctgtgcttgcacagattgctggcgaccggcgcacgggtgagtaacgcgtatccaaccttccccttagtagaggatagcccggcgaaagtcggattaatactctatgttgttcaatgcggacatctaagttgaaccaaaggtttaccgctaagggatggggatgcgtctgattaggtagtaggcggggtaacggcccacctagccaacgatcagtaggggttctgagagg

SEQ ID NO: 5889 - DNA, 300 bp, Unknown
  Ascusbbf_729D, encodes 16S rRNA
agagtttgatcctggctcaggatgaacgctagctacaggcttaacacatgcaagtcgaggggcatcagggtctgtgcttgcacagattgctggcgaccggcgcacgggtgagtaacgcgtatccaaccttccccttagtagaggatagcccggcgaaagtcggattaatactctatgttgttcaatgcggacatctaagttgaaccaaaggtttaccgctaagggatggggatgcgtctgattaggttgttggcggggtaacggcccaccaagcctacgatcagtaggggttctgagagg

SEQ ID NO: 5890 - DNA, 300 bp, Unknown
  Ascusbbf_729E, encodes 16S rRNA
agagtttgatcatggctcaggatgaacgctagctacaggcttaacacatgcaagtcgaggggcatcaggatctgtgcttgcacagattgctggcgaccggcgcacgggtgagtaacgcgtatccaaccttccccttagtagaggatagcccggcgaaagtcggattaatactctatgttgttcaatgcggacatctaagttgaaccaaaggcttgccgctaagggatggggatgcgtctgattaggttgttggcggggtaacggcccaccaagccatcgatcagtaggggttctgagagg

SEQ ID NO: 5891 - DNA, 300 bp, Unknown
  Ascusbbf_729F, encodes 16S rRNA
agagtttgatcatggctcaggatgaacgctagctacaggcttaacacatgcaagtcgaggggcatcaggatttgtgcttgcacagattgctggcgaccggcgcacgggtgagtaacgcgtatccaaccttccccttagtagaggatagcccggcgaaagtcggattaatactctatgttgttcaatgcggacatctaagttgaaccaaaggtttaccgctaagggatggggatgcgtctgattaggtagtaggcggggtaacggcccacctagccaacgatcagtaggggttctgagagg

SEQ ID NO: 5892 - DNA, 300 bp, Unknown; identical to SEQ ID NO: 5574
  Ascusbbf_201A, encodes 16S rRNA

SEQ ID NO: 5893 - DNA, 300 bp, Unknown
  Ascusbbf_201B, encodes 16S rRNA
agagtttgatcctggctcaggatgaacgctagctacaggcttaacacatgcaagtcgaggggcagcataacgaaagcttgcttttgttgatggcgaccggcgcacgggtgagtaacgcgtatccaaccttccctatactagagaatagcccggcgaaagtcggattaatgctctatgttcttctttgatggcatctgacgagaagcaaaggtttaccggtataggatggggatgcgtctgattaggttgttggcggggtaacggcccaccaagcctgcgatcagtaggggttctgagagg

SEQ ID NO: 5894 - DNA, 300 bp, Unknown
  Ascusbbf_201C, encodes 16S rRNA
agagtttgatcctggctcaggatgaacgctagctacaggcttaacacatgcaagtcgaggggcagcataacgaaagcttgcttttgttgatggcgaccggcgcacgggtgagtaacgcgtatccaaccttccctatactagagaatagcccggcgaaagtcggattaatgctctatgttcttctttgatggcatctgacgagaagcaaaggtttaccggtataggatggggatgcgtctgattaggttgttggcggggtaacggcccaccaagcctacgatcagtaggggttctgagagg

SEQ ID NO: 5895 - DNA, 300 bp, Unknown; identical to SEQ ID NO: 5574
  Ascusbbf_201D, encodes 16S rRNA

SEQ ID NO: 5896 - DNA, 300 bp, Unknown
  Ascusbbf_201E, encodes 16S rRNA
agatttgatcatggctcaggatgaacgctagctacaggcttaacacatgcaagtcgaggggcagcatatagatagcttgctatttatgatggcgaccggcgcacgggtgagtaacgcgtatccaaccttccctatactagagaatagcccggcgaaagtcggattaatgctctatgttcttctttgatggcatctgacgagaagcaaaggtttaccggtataggatggggatgcgtctgattaggttgttggcggggtaacggcccaccaagcctacgatcagtaggggttctgagagga

SEQ ID NO: 5897 - DNA, 300 bp, Unknown
  Ascusbbf_201F, encodes 16S rRNA
agagtttgatcatggctcaggatgaacgctagctacaggcttaacacatgcaagtcgaggggcagcatatagatagcttgctatttatgatggcgaccggcgcacgggtgagtagcgcgtatccaaccttccctatactagagaatagcccggcgaaagtcggattaatgctctatgttcttctttgatggcatctgacgagaagcaaaggtttaccggtataggatggggatgcgtctgattaggttgttggcggggtaacggcccacctaaccgacgatcagtaggggttctgagagg

SEQ ID NO: 5898 - DNA, 300 bp, Unknown
  Ascusbbf_201G, encodes 16S rRNA
agagtttgatcatggctcaggatgaacgctagctacaggcttaacacatgcaagtcgaggggcagcataacgaaagcttgcttttgttgatggcgaccggcgcacgggtgagtaacgcgtatccaaccttccctatactagagaatagcccggcgaaagtcggattaatgctctatgttcttctttgatggcatctgacgagaagcaaaggtttaccggtataggatggggatgcgtctgattaggtcgttggcggggtaacggcccaccaagcctacgatcagtaggggttctgagagg

SEQ ID NO: 5899 - DNA, 300 bp, Unknown; identical to SEQ ID NO: 5894
  Ascusbbf_201H, encodes 16S rRNA

SEQ ID NO: 5900 - DNA, 301 bp, Unknown
  Ascusbbf_201I, encodes 16S rRNA
agagtttgatcctggctcaggatgaacgctagctacaggcttaacacatgcaagtcgaggggcagcatgaagatgtgcttgcacaactttgatggcgaccggcgcacgggtgagtaacgcgtatccaaccttccctatactagagaatagcccggcgaaagtcggattaatgctctatgttcttctttgatggcatctgacgagaagcaaaggtttaccggtataggatggggatgcgtctgattaggttgttggcggggtaacggcccaccaagcctacgatcagtaggggttctgagag

SEQ ID NO: 5901 - DNA, 300 bp, Unknown; identical to SEQ ID NO: 5735
  Ascusbbf_416A, encodes 16S rRNA

SEQ ID NO: 5902 - DNA, 300 bp, Unknown
  Ascusbbf_416B, encodes 16S rRNA
agagtttgatcctggctcaggatgaacgctagctacaggcttaacacatgcaagtcgaggggcatcatggagtttgcttgcaaactctgatggcgaccggcgcacgggtgagtaacgcgtatccaaccttccctatagtagaggatagcccggcgaaagtcggattaatactctatgttttccgttgcagacatctaagatggaacaaaggcttgccgctataggatggggatgcgtctgattaggtagtcggcggggtaacggcccaccgagccttcgatcagtaggggttctgagagg

SEQ ID NO: 5903 - DNA, 300 bp, Unknown
  Ascusbbf_416C, encodes 16S rRNA
agagtttgatcctggctcaggatgaacgctagctacaggcttaacacatgcaagtcgaggggcatcatggagtttgcttgcaaactctgatggcgaccggcgcacgggtgagtaacgcgtatccaaccttccctatagtagaggatagcccggcgaaagtcggattaatactctatgttttccgttgcagacatctaagatggaacaaaggcttgccgctataggatggggatgcgtctgattaggtagtcggcggggtaacggcccaccgagccatcgatcagtaggggttctgagagg

SEQ ID NO: 5904 - DNA, 301 bp, Unknown
  Ascusbbf_416D, encodes 16S rRNA
agagtttgatcatggctcaggatgaacgctagctacaggcttaacacatgcaagtcgaggggcagcatgaagtttgcttgcaaactttgatggcgaccggcgcacgggtgagtaacgcgtatccaaccttccctatagtagaggatagcccggcgaaagtcggattaatactctatgttttccaatgcagacatctaaaatggaacaaaggtttaccgctataggatggggatgcgtctgattaggtagtcggcggggtaacggcccaccgagccatcgatcagtaggggttctgagagga

SEQ ID NO: 5905 - DNA, 301 bp, Unknown
  Ascusbbf_416E, encodes 16S rRNA
agagtttgatcctggctcaggatgaacgctagctacaggcttaacacatgcaagtcgaggggcagcatgaagtttgcttgcaaactttgatggcgaccggcgcacgggtgagtaacgcgtatccaaccttccctatagtagaggatagcccggcgaaagtcggattaatactctatgttttccaatgcagacatctaaaatggaacaaaggtttaccgctataggatggggatgcgtctgattaggtagtcggcggggtaacggcccaccgagccatcgatcagtaggggttctgagagga

SEQ ID NO: 5906 - DNA, 300 bp, Unknown
  Ascusbbf_416F, encodes 16S rRNA
agagtttgatcatggctcaggatgaacgctagctacaggcttaacacatgcaagtcgaggggcatcatggagtttgcttgcaaactctgatggcgaccggcgcacgggtgagtaacgcgtatccaaccttccctatagtagaggatagcccggcgaaagtcggattaatactctatgttttccgttgcagacatctaagatggaacaaaggcttgccgctataggatggggatgcgtctgattaggtagtcggcggggtaacggcccaccgagccttcgatcagtaggggttctgagagg

SEQ ID NO: 5907 - DNA, 300 bp, Unknown
  Ascusbbf_416G, encodes 16S rRNA
agagtttgatcctggctcaggatgaacgctagctacaggcttaacacatgcaagtcgaggggcatcatggagtttgcttgcaaactctgatggcgaccggcgcacgggtgagtaacgcgtatccaaccttccctatagtagaggatagcccggcgaaagtcggattaatactctatgttttccgttgcagacatctaagatggaacaaaggcttgccgctataggatggggatgcgtctgattaggttgttggcggggtaacggcccaccaagccttcgatcagtaggggttctgagagg

SEQ ID NO: 5908 - DNA, 300 bp, Unknown
  Ascusbbf_15806A, encodes 16S rRNA
agagtttgatcctggctcaggatgaacgctagctacaggcttaacacatgcaagtcgaggggcagcatgatcttagcttgctaagattgatggcgaccggcgcacgggtgagtaacgcgtatccaaccttccctatagtagaggatagcccggcgaaagtcggattaatactctatgttttccgttgcagacatctaaaatggaacaaaggtttaccgctataggatggggatgcgtctgattaggttgttggcggggtaacggcccaccaagccttcgatcagtaggggttctgagagg

SEQ ID NO: 5909 - DNA, 300 bp, Unknown
  Ascusbbf_15806B, encodes 16S rRNA
agagtttgatcctggctcaggatgaacgctagctacaggcttaacacatgcaagtcgaggggcagcatgacgatagcttgctattgttgatggcgaccggcgcacgggtgagtaacgcgtatccaaccttccctatagtagaggatagcccggcgaaagtcggattaatactctatgttttccaatgcagacatctaaaatggaacaaaggtttaccgctataggatggggatgcgtctgattaggttgttggcggggtaacggcccaccaagcctacgatcagtaggggttctgagagg

SEQ ID NO: 5910 - DNA, 299 bp, Unknown
  Ascusbbf_6115A, encodes 16S rRNA
agagtttgatcctggctcaggatgaacgctggcggcgtgcctaacacatgcaagtcgaacggaaatgtttagatgaagttttcggatggattcttttcattttagtggcggacgggtgagtaacacgtgggtaacctgccctgtaccgggggataacacttagaaataggtgataataccgcataagcgcacactgacgcatgtcagagtgtgaaaaactccggtggtacaggatggacccgcgtctgattagcttgttggcggggtaacggcccaccaaggcgacgatcagtagccgg

SEQ ID NO: 5911 - DNA, 299 bp, Unknown
  Ascusbbf_6115B, encodes 16S rRNA
agagtttgatcatggctcaggatgaacgctggcggcgtgcctaacacatgcaagtcgaacggaaatgttttgatgaagatttcggttggattcatttcattttagtggcggacgggtgagtaacacgtgggtaacctgccctgtaccgggggataacacttagaaataggtgataataccgcataagcgcacactgacgcatgtcagagtgtgaaaaactccggtggtacaggatggacccgcgtctgattagcttgttggcggggtaacggcccaccaaggcgacgatcagtagccgg

SEQ ID NO: 5912 - DNA, 299 bp, Unknown
  Ascusbbf_6115C, encodes 16S rRNA
agagtttgatcctggctcaggatgaacgctggcggcgtgcctaacacatgcgagtcgaacggaaatgtttagatgaagttttcggatggattcttttcattttagtggcggacgggtgagtaacacgtgggtaacctgccctgtaccgggggataacacttagaaataggtgataataccgcataagcgcacactgacgcatgtcagagtgtgaaaaactccggtggtacaggatggacccgcgtctgattagcttgttggcggggtaacggcccaccaaggcgacgatcagtagccgg

SEQ ID NO: 5913 - DNA, 299 bp, Unknown
  Ascusbbf_6115D, encodes 16S rRNA
agagtttgatcctggctcaggatgaacgctggcggcgtgcctaacacatgcaagtcgaacggaaatgttttgatgaagatttcggttggattcatttcattttagtggcggacgggtgagtaacacgtgggtaacctgccctgtaccgggggataacacttagaaataggtgataataccgcataagcgcacactgacgcatgtcagagtgtgaaaaactccggtggtacaggatggacccgcgtctgattagcttgttggcggggtaacggcccaccaaggcgacgatcagtagccgg

SEQ ID NO: 5914 - DNA, 301 bp, Unknown
  Ascusbbf_1325058A, encodes 16S rRNA
agagtttgatcctggctcaggacgaacgctggcggcgtgcttaacacatgcaagtcgaacggggcgaagaggagcttgctcttcctagcctagtggcaaacgggtgagtaacgcgtaggcaacctgcccttcagatggggacaacatttcgaaaggaatgctaataccgaatgacgtgcattggtcgcatgaccgatgtaccaaaggccgggcaaccggtcactgaaggatgggcctgcgtctgattagctagttggtggggtaacggctcaccaaggcgacgatcagtagccggtctgag

SEQ ID NO: 5915 - DNA, 301 bp, Unknown
  Ascusbbf_1325058B, encodes 16S rRNA
agagtttgatcatggctcaggacgaacgctggcggcgtgcttaacacatgcaagtcgaacggggcgaagaggagcttgctcttcctagcttagtggcaaacgggtgagtaacgcgtaggcaacctgcccttcagatggggacaacatttcgaaaggaatgctaataccgaatgacgtgcattggtcgcatgaccgatgtaccaaaggccgggcaaccggtcactgaaggatgggcctgcgtctgattagctagttggtggggtaacggcccaccaaggcgacgatcagtagccggtctgag

SEQ ID NO: 5916 - DNA, 301 bp, Unknown
  Ascusbbf_1325058C, encodes 16S rRNA
agagtttgatcatggctcaggaagaacgctggcggcgtgcttaacacatgcaagtcgaacggggcgaagaagagcttgctcttcctagcctagtggcaaacgggtgagtaacgcgtaggcaacctgcccttcagatggggacaacatttcgaaaggaatgctaataccgaatgaagtgcattggccgcatggccgatgcaccaaaggccgggcaaccggtcactgaaggatgggcctgcgtctgattagctagttggtggggtaacggcccaccaaggcgacgatcagtagccggtctgag

SEQ ID NO: 5917 - DNA, 301 bp, Unknown
  Ascusbbf_1325058D, encodes 16S rRNA
agagtttgatcctggctcaggacgaacgctggcggcgtgcttaacacatgcaagtcgaacggggcgaagaggagcttgctcttcctagcctagtggcaaacgggtgagtaacgcgtaggcaacctgcccttcagatggggacaacatttcgaaaggaatgctaataccgaatgacgtgcattggtcgcatgaccgatgtaccaaaggccgggcaaccggtcactgaaggatgggcctgcgtctgattagctagttggtggggtaacggcccaccaaggcgacgatcagtagccggtctgag

SEQ ID NO: 5918 - DNA, 301 bp, Unknown
  Ascusbbf_1325058E, encodes 16S rRNA
agagtttgatcctggctcaggacgaacgctggcggcgtgcttaacacatgcaagtcgaacggggcgaagaagagcttgctcttcctagcctagtggcaaacgggtgagtaacgcgtaggcaacctgcccttcagatggggacaacatttcgaaaggaatgctaataccgaatgaagtgcattggccgcatggccgatgcaccaaaggccgggcaaccggtcactgaaggatgggcctgcgtctgattagctagttggtggggtaacggcccaccaaggcgacgatcagtagccggtctgag

SEQ ID NO: 5919 - DNA, 301 bp, Unknown
  Ascusbbf_1325058F, encodes 16S rRNA
agagtttgatcatggctcaggacgaacgctggcggcgtgcttaacacatgcaagtcgaacggggcgaagaagagcttgctcttcctagcctagtggcaaacgggtgagtaacgcgtaggcaacctgcccttcagatggggacaacatttcgaaaggaatgctaataccgaatgaagtgcattggccgcatggccgatgcaccaaaggccgggcaaccggtcactgaaggatgggcctgcgtctgattagctagttggtggggtaacggcccaccaaggcgacgatcagtagccggtctgag

SEQ ID NO: 5920 - DNA, 300 bp, Unknown
  Ascusbbf_28350A, encodes 16S rRNA
agagtttgatcatggctcaggatgaacgctagctacaggcttaacacatgcaagtcgcggggtaacgagaggaaagcttgctttccttgtcgacgaccggcgcacgggtgagtaacgcgtatccaacctgcccattaccacgggatagcccgtcgaaaggcggattaataccgtatgaacttcatggatggcatctgatatgaagtaaaggtttagcggtaatggatggggatgcgtccgattagatagttggtgaggcaacggctcaccaagtcgacgatcggtaggggttctgagagg

SEQ ID NO: 5921 - DNA, 300 bp, Unknown
  Ascusbbf_28350B, encodes 16S rRNA
agagtttgatcatggctcaggatgaacgctagctacaggcttaacacatgcaagtcgcggggtaacgagaggaaagcttgctttccttgtcgacgaccggcgcacgggtgagtaacgcgtatccaacctgcccattaccacgggatagcccgtcgaaaggcggattaataccgtatgaacttcatggatggcatctgatatgaagtaaaggtttagcggtaatggatggggatgcgtccgattagatagttggtgaggcaacggctcaccaagtcaacgatcggtaggggttctgagagg

SEQ ID NO: 5922 - DNA, 300 bp, Unknown
  Ascusbbf_28350C, encodes 16S rRNA
agagtttgatcctggctcaggatgaacgctagctacaggcttaacacatgcaagtcgcggggtaacgagaggaaagcttgctttccttgtcgacgaccggcgcacgggtgagtaacgcgtatccaacctgcccattaccacgggatagcccgtcgaaaggcggattaataccgtatgaacttcatggatggcatctgatatgaagtaaaggtttagcggtaatggatggggatgcgtccgattagatagttggtgaggcaacggctcaccaagtcgacgatcggtaggggttctgagagg

SEQ ID NO: 5923 - DNA, 301 bp, Unknown
  Ascusbbf_372A, encodes 16S rRNA
agagtttgatcctggctcaggatgaacgctagcgacaggcttaacacatgcaagtcgaggggcagcgggcgagtggcaacacttgctgtcggcgaccggcgcactggtgagtaacacgtatgcaacctgcccccttctgggagataacccatagaaatgtggcctaatatcccatagtcggtccagccgcatggccgggccgggaaaggcgagccggaaggggatgggcatgcggcgcattagctagttggcggggcagaggcccaccaaggcgacgatgcgtaggggttctgagaggaag

SEQ ID NO: 5924 - DNA, 299 bp, Unknown
  Ascusbbf_372B, encodes 16S rRNA
agagtttgatcatggctcaggacgaacgctggcggcgtgcttaacacatgcaagtcgaggggcagcgggcgagtggcaacacttgctgtcggcgaccggcgcactggtgagtaacacgtatgcaacctgcccccttctgggagataacccatagagatgtggcctaatatcccatagtcggtccagccgcatggccgggccgggaaaggcgagccggaaggggatgggcatgcggcgcattagctagttggcggggcagaggcccaccaaggcgacgatgcgtaggggttctgagagga

SEQ ID NO: 5925 - DNA, 301 bp, Unknown
  Ascusbbf_372C, encodes 16S rRNA
agagtttgatcatggctcaggatgaacgctagcgacaggcttaacacatgcaagtcgaggggcagcgggcgagtggcaacactcgctgtcggcgaccggcgcactggtgagtaacacgtatgcaacctgcccccttctgggagataacccatagaaatgtggcctaatatcccatagtcggtccagccgcatggccgggccgggaaaggcgagccggaaggggatgggcatgcggcgcattagctagttggcggggcagaggcccaccaaggcgacgatgcgtaggggttctgagaggaag

SEQ ID NO: 5926 - DNA, 301 bp, Unknown
  Ascusbbf_372D, encodes 16S rRNA
agagtttgatcatggctcaggatgaacgctagcgacaggcttaacacatgcaagtcgaggggcagcgggcgagtggcaacacttgctgtcggcgaccggcgcactggtgagtaacacgtatgcaacctgcccccttctgggagataacccatagaaatgtggcctaatatcccatagtcggcccagccgcatggctgggccgggaaaggcgagccggaaggggatgggcatgcggcgcattagctagttggcggggcagaggcccaccaaggcgacgatgcgtaggggttctgagaggaag

SEQ ID NO: 5927 - DNA, 301 bp, Unknown
  Ascusbbf_372E, encodes 16S rRNA
agagtttgatcctggctcaggatgaacgctagcgacaggcttaacacatgcaagtcgaggggcagcgggcgagtggcaacacttgctgtcggcgaccggcgcactggtgagtaacacgtatgcaacctgcccccttctgggagataacccatagaaatgtggcctaatatcccatagtcggcccagccgcatggccgggccgggaaaggcgagccggaaggggatgggcatgcggcgcattagctagttggcggggcagaggcccaccaaggcgacgatgcgtaggggttctgagaggaag

SEQ ID NO: 5928 - DNA, 301 bp, Unknown
  Ascusbbf_372F, encodes 16S rRNA
agagtttgatcctggctcaggacgaacgctggcggcgtgcttaacacatgcaagtcgaggggcagcgggcgagtggcaacacttgctgtcggcgaccggcgcactggtgagtaacacgtatgcaacctgcccccttctgggagataacccatagaaatgtggcctaatatcccatagtcggcccagccgcatggccgggccgggaaaggcgagccggaaggggatgggcatgcggcgcattagctagttggcggggcagaggcccaccaaggcgacgatgcgtaggggttctgagaggaag

SEQ ID NO: 5929 - DNA, 300 bp, Unknown
  Ascusbbf_372G, encodes 16S rRNA
agagtttgatcctggctcaggatgaacgctagcgacaggcttaacacatgcaagtcgaggggcagcgggcgagtggcaacacttgctgtcggcgaccggcgcactggtgagtaacacgtatgcaacctgcccccttctgggagataacccatagaaatgtggcctaatatcccatagtcggcccagccgcatggccgggccgggaaaggcgagccggaaggggatgggcatgcggcgcattagctagttggcggggcagaggcccaccaaggcgacgatgcgtaggggttctgagaggaa

SEQ ID NO: 5930 - DNA, 301 bp, Unknown
  Ascusbbf_667A, encodes 16S rRNA
agagtttgatcctggctcaggacgaacgctggcggcatgcctaacacatgcaagtcgaacggagattatttcggtaatcttagtggcgaacgggtgagtaacgcgtaggcaacctgccctttagttggggacaacattccgaaaggggtgctaataccgaatgtgatcgcttttccgcatggaagagcgatgaaagatggcctctatttataagctatcgctaaaggatgggcctgcgtctgattagctagttggtggggtaacggcctaccaaggcgacgatcagtagccggtctgagag

SEQ ID NO: 5931 - DNA, 301 bp, Unknown
  Ascusbbf_667B, encodes 16S rRNA
agagtttgatcatggctcaggacgaacgctggcggcatgcctaacacatgcaagtcgaacggagattatttcggtaatcttagtggcgaacgggtgagtaacgcgtaggcaacctgccctttagttggggacaacattccgaaaggggtgctaataccgaatgtgatcgcttttccgcatggaagagcgatgaaagatggcctctatttataagctatcgctaaaggatgggcctgcgtctgattagctagttggtggggtaacggcctaccaaggcgacgatcagtagccggtctgagag

SEQ ID NO: 5932 - DNA, 301 bp, Unknown
  Ascusbbf_1207A, encodes 16S rRNA
agagtttgatcatggctcaggatgaacgctagcgacaggcctaacacatgcaagtcgaggggcagcacgaaggaagcttgctttctttggtggcgaccggcgcacgggtgcgtaacaggtgtgcaatctgtccatagtcggggaatagcccagcgaaagttggattaatgctccatgtgaatcgagaccgcatgatcttgatttgaaacgtaaggactatgggtgagcacgcttctgattagatagttggtgaggtaacggctcaccaagtcgacgatcagtaggggttctgagaggaagg

SEQ ID NO: 5933 - DNA, 300 bp, Unknown
  Ascusbbf_1207B, encodes 16S rRNA
agagtttgatcatggctcaggatgaacgctagcgacaggcctaacacatgcaagtcgaggggcagcgcggaagaagcttgctttttctggcggcgaccggcgcacgggtgcgtaacaggtgtgcaatctgtccatagtcggggaatagcccagcgaaagttggattaatgctccatgtgaatcgagaccgcatgatcttgatttgaaacgtaaggactatgggtgagcacgcttctgattagatagttggtgaggtaacggctcaccaagtcgacgatcagtaggggttctgagaggaag

SEQ ID NO: 5934 - DNA, 300 bp, Unknown
  Ascusbbf_1207C, encodes 16S rRNA
agagtttgatcatggctcaggatgaacgctagcgacaggcctaacacatgcaagtcgaggggcagcgggattgaagcttgctttaattgccggcgaccggcgcacgggtgcgtaacaggtgtgcaatctgtccatagtcggggaatagcccagcgaaagttggattaatgctccatgtgaatcgagaccgcatgattttgatttgaaacgtaaggactatgggtgagcacgcttctgattagatagttggtgaggtaacggctcaccaagtcgacgatcagtaggggttctgagaggaag

SEQ ID NO: 5935 - DNA, 301 bp, Unknown
  Ascusbbf_1207D, encodes 16S rRNA
agagtttgatcatggctcaggatgaacgctagcgacaggcctaacacatgcaagtcgaggggcagcgggattgaagcttgctttaattgccggcgaccggcgcacgggtgcgtaacaggtgtgcaatctgtccatagtcgggggatagcccagcgaaagctgaattaacactccatgtgaatcgagaccgcatgatcttgatttgaaacgcaaggactatgggtgagcacgcttctgattagatagttggtgaggtaacggctcaccaagtcgacgatcagtaggggttctgagaggaagg

SEQ ID NO: 5936 - DNA, 301 bp, Unknown
  Ascusbbf_1207E, encodes 16S rRNA
agagttttatcatggctcaggatgaacgctagctacaggcttaacacatgcaagtcgaggggcagcgggattgaagcttgctttaattgccggcgaccggcgcacgggtgcgtaacaggtgtgcaatctgtccatagtcgggggatagcccagcgaaagctgaattaatgctccatgtgaatcgagaccgcatgattttgatttgaaacgtaaggactatgggtgagcacgcttctgattagatagttggtgaggtaacggctcaccaagtcgacgatcagtaggggttctgagaggaagg

SEQ ID NO: 5937 - DNA, 301 bp, Unknown
  Ascusbbf_1207F, encodes 16S rRNA
agagtttgatcctggctcaggatgaacgctagcgacaggcctaacacatgcaagtcgaggggcagcgcggaagaagcttgctttttctggcggcgaccggcgcacgggtgcgtaacaggtgtgcaatctgtccatagtcggggaatagcccagcgaaagttggattaatgctccatgtgaatcgagaccgcatgatcttgatttgaaacgtaaggactatgggtgagcacgcttctgattagatagttggtgaggtaacggctcaccaagtcgacgatcagtaggggttctgagaggaagg

SEQ ID NO: 5938 - DNA, 301 bp, Unknown
  Ascusbbf_1207G, encodes 16S rRNA
agagtttgatcctggctcaggatgaacgctagcgacaggcctaacacatgcaagtcgaggggcagcgggattgaagcttgctttaattgccggcgaccggcgcacgggtgcgtaacaggtgtgcaatctgtccatagtcggggaatagcccagcgaaagttggattaatgctccatgtgaatcgagaccgcatgattttgatttgaaacgtaaggactatgggtgagcacgcttctgattagatagttggtgaggtaacggctcaccaagtcgacgatcagtaggggttctgagaggaagg

SEQ ID NO: 5939 - DNA, 301 bp, Unknown
  Ascusbbf_1207H, encodes 16S rRNA
agagtttgatcatggctcaggatgaacgctagcgacaggcctaacacatgcaagtcgaggggcagcgggattgaagcttgctttaattgccggcgaccggcgcacgggtgcgtaacaggtgtgcaatctgtccatagtcggggaatagcccagcgaaagttggattaatgctccatgtgaatcgagaccgcatgatcttgatttgaaacgtaaggactatgggtgagcacgcttctgattagatagttggtgaggtaacggctcaccaagtcgacgatcagtaggggttctgagaggaagg

SEQ ID NO: 5940 - DNA, 301 bp, Unknown
  Ascusbbf_1207I, encodes 16S rRNA
agagtttgatcatggctcaggatgaacgctagcgacaggcctaacacatgcaagtcgaggggcagcgggattgaagcttgctttaattgccggcgaccggcgcacgggtgcgtaacaggtgtgcaatctgtccatagtcggggaatagcccagcgaaagttggattaatgctccatgtgaatcgagaccgcatgattttgatttgaaacgtaaggactatgggtgagcacgcttctgattagatagttggtgaggtaacggctcaccaagtcgacgatcagtaggggttctgagaggaagg

SEQ ID NO: 5941 - DNA, 301 bp, Unknown
  Ascusbbf_1207J, encodes 16S rRNA
agagtttgatcctggctcaggatgaacgctagcgacaggcctaacacatgcaagtcgaggggcagcgggattgaagcttgctttaattgccggcgaccggcgcacgggtgcgtaacaggtgtgcaatctgtccatagtcggggaatagcccagcgaaagttggattaatgctccatgtgaatcgagaccgcatgattttgatttgaaacgtaaggactatgggtgagcacgcttctgattagatagttggtggggtaacggctcaccaagtcgacgatcagtaggggttctgagaggaagg

SEQ ID NO: 5942 - DNA, 301 bp, Unknown
  Ascusbbf_3875A, encodes 16S rRNA
agagtttgatcctggctcaggatgaacgctggcggcgtgcctaatacatgcaagtcgaacggagtgtgccattgatgaggcttcggcggattcgccggtacacttagtggcggacgggtgagtaacgcgtggataacctgcctcacacagggggatagcagctggaaacggctgataataccgcataagcgcacagtgacgcatgtcacagtgtgaaaaactccggtggtgtgagatggatccgcgtctgattagcttgttggcggggtaacggcccaccaaggcgacgatcagtagccgg

SEQ ID NO: 5943 - DNA, 301 bp, Unknown
  Ascusbbf_3875B, encodes 16S rRNA
agagtttgatcatggctcaggatgaacgctggcggcgtgcctaatacatgcaagtcgaacggagtgtgccattgatgaggcttcggcggattcgccggtacacttagtggcggacgggtgagtaacgcgtggataacctgcctcacacagggggatagcagctggaaacggctgataataccgcataagcgcacggtgacgcatgtcacagtgtgaaaaactccggtggtgtgagatggatccgcgtctgattagcttgttggcggggtaacggcccaccaaggcgacgatcagtagccgg

SEQ ID NO: 5944 - DNA, 301 bp, Unknown
  Ascusbbf_3875C, encodes 16S rRNA
agagtttgatcctggctcaggatgaacgctggcggcgtgcctaatacatgcaagtcgaacggagtgtgccattgatgaagcttcggcggattcgccggtacacttagtggcggacgggtgagtaacgcgtggataacctgcctcacacagggggatagcagctggaaacggctgataataccgcataagcgcacagtgacgcatgtcacagtgtgaaaaactccggtggtgtgagatggatccgcgtctgattagcttgttggcggggtaacggcccaccaaggcgacgatcagtagccgg

SEQ ID NO: 5945 - DNA, 301 bp, Unknown
  Ascusbbf_3875D, encodes 16S rRNA
agagtttgatcatggctcaggatgaacgctggcggcgtgcctaatacatgcaagtcgaacggagtgtgccattgatgaagcttcggcagattcgccggtacacttagtggcggacgggtgagtaacgcgtggataacctgcctcacacagggggatagcagctggaaacggctgataataccgcataagcgcacagtgacgcatgtcacagtgtgaaaaactccggtggtgtgagatggatccgcgtctgattagcttgttggcggggtaacggcccaccaaggcgacgatcagtagccgg

SEQ ID NO: 5946 - DNA, 300 bp, Unknown
  Ascusbbf_72889A, encodes 16S rRNA
agagtttgatcatggctcaggatgaacgctggcggcgtgcctaacacatgcaagtcgagcggaccttagagagtgaacagcttgctgggatctttcgaaaggttagcggcggacgggtgagtaacgcgtgggtaacctgcctcatacagggggatagcagttggaaacgactggtaataccgcataagcgcacagtgccgcatggtacggtgtgaaaaactccggtggtatgagatggacccgcgtccgattagccagttggcggggtaacggcccaccaaagcgacgatcggtagccgg

SEQ ID NO: 5947 - DNA, 300 bp, Unknown
  Ascusbbf_72889B, encodes 16S rRNA
agagtttgatcctggctcaggatgaacgctggcggcgtgcctaacacatgcaagtcgagcggaccttagagagtgaacagcttgctgggatcttttgaaaggttagcggcggacgggtgagtaacgcgtgggtaacctgcctcatacagggggatagcagttggaaacgactggtaataccgcataagcgcacagtaccgcatggtacggtgtgaaaaactccggtggtatgagatggacccgcgtccgattagccagttggcggggtaacggcccaccaaagcgacgatcggtagccgg

SEQ ID NO: 5948 - DNA, 301 bp, Unknown
  Ascusbbf_106863A, encodes 16S rRNA
agagtttgatcctggctcaggatgaacgctagcgacaggcttaacacatgcaagtcgaggggcagcgcgagggtagcaatacctttggcggcgaccggcgcactggtgagtaacacgtatgcgacctgccccggacagggggataaacccgggaaactgggcctaataccccatacgcctattggccgcatggtccttaggtgaaagatccgtcggtccgggatgggcatgcggcgcattagcttgttggcggggcaacggcccaccaaggcgacgatgcgtaggggttctgagaggaagg

SEQ ID NO: 5949 - DNA, 301 bp, Unknown
  Ascusbbf_106863B, encodes 16S rRNA
agagtttgatcctggctcaggatgaacgctagcgacaggcttaacacatgcaagtcgaggggcagcgcgggggtagcaatacctttggcggcgaccggcgcactggtgagtaacacgtatgcgacctgccccggacagggggataaacccgggaaactgggcctaataccccataggccttccgaccgcatggtcggtaggtgaaagatccgtcggtccgggatgggcatgcggcgcattagcttgttggcggggcaacggcccaccaaggcgacgatgcgtaggggttctgagaggaagg

SEQ ID NO: 5950 - DNA, 300 bp, Unknown
  Ascusbbf_120B, encodes 16S rRNA
agagtttgatcctggctcaggatgaacgctagctacaggcttaacacatgcaagtcgaggggcagcatattggtagcttgctactaatgatggcgaccggcgcacgggtgagtaacgcgtatccaaccttccctatactagaggatagcccggcgaaagtcggattaatactctatgttcttcgtagatgacatctgaaatgaagcaaagatttatcggtataggatggggatgcgtctgattaggttgttggcggggtaacggcccaccaagcccgcgatcagtaggggttctgagagg

SEQ ID NO: 5951 - DNA, 300 bp, Unknown
  Ascusbbf_120C, encodes 16S rRNA
agagtttgatcctggctcaggatgaacgctagctacaggcttaacacatgcaagtcgaggggcagcatattggtagcttgctactaatgatggcgaccggcgcacgggtgagtaacgcgtatccaaccttccctatactagaggatagcccggcgaaagtcggattaatactctatgttcttcgtagatgacatctgaaatgaagcaaagatttatcggtataggatggggatgcgtctgattaggttgttggcggggtaacggcccaccaagcctgcgatcagtaggggttctgagagg

SEQ ID NO: 5952 - DNA, 301 bp, Unknown
  Ascusbbf_1207K, encodes 16S rRNA
agagtttgatcatggctcaggatgaacgctagcgacaggcctaacacatgcaagtcgaggggcagcgggattgaagcttgctttaattgccggcgaccggcgcacgggtgcgtaacaggtgtgcaatctgtccatagtcggggaatagcccagcgaaagttggattaatgctccatgtgaatcgaagccgcatgactttgatttgaaacgtaaggactatgggtgagcacgcttctgattagatagttggtgaggtaacggctcaccaagtcgacgatcagtaggggttctgagaggaagg

SEQ ID NO: 5953 - DNA, 301 bp, Unknown
  Ascusbbf_1207L, encodes 16S rRNA
agagtttgatcctggctcaggatgaacgctagcgacaggcctaacacatgcaagtcgaggggcagcgggattgaagcttgctttaattgccggcgaccggcgcacgggtgcgtaacaggtgtgcaatctgtccatagtcggggaatagcccagcgaaagttggattaatgctccatgtgaatcgaagccgcatgactttgatttgaaacgtaaggactatgggtgagcacgcttctgattagatagttggtgaggtaacggctcaccaagtcgacgatcagtaggggttctgagaggaagg

SEQ ID NO: 5954 - DNA, 300 bp, Unknown
  Ascusbbf_930A, encodes 16S rRNA
agagtttgatcctggctcaggatgaacgctagctacaggcttaacacatgcaagtcgaggggcagcatgatcttagcttgctaagattgatggcgaccggcgcacgggtgagtaacgcgtatccaaccttccctgtactaggggatagcccggcgaaagtcggattaataccctatgttttccgaagcgagcatttaatttggaacaaaggtttaccggtataggatggggatgcgtctgattagatagtaggcggggtaacggcccacctagtcgacgatcagtaggggttctgagagg

SEQ ID NO: 5955 - DNA, 300 bp, Unknown
  Ascusbbf_915A, encodes 16S rRNA
agagtttgatcctggctcaggatgaacgctagctacaggcttaacacatgcaagtcgaggggcagcatgaagtcagcttgctgactttgatggcgaccggcgcacgggtgcgtaacacgtatccaatctacccatggctcagggatagcctttcgaaagaaagattaatacctgatggtcttacatggagacatctcctagtaagtaaagattaatcggcgatggatgaggatgcgtctgattagatagtaggcggggtaacggcccacctagtcgacgatcagtaggggttctgagagg

SEQ ID NO: 5956 - DNA, 300 bp, Unknown
  Ascusbbf_8941A, encodes 16S rRNA
agagtttgatcatggctcaggatgaacgctagctacaggcttaacacatgcaagtcgaggggcagcatgggggttgcttgcaactcccgatggcgaccggcgcacgggtgagtaacgcgtatccaaccttccccatagtaggggatagcccgtagaaatgcggattaataccctatgttctccgaagaggacatctgatttggagtaaagatttatcgctatgggatggggatgcgtctgattaggctgcaggcggggtaacggcccacctggcctacgatcagtaggggttctgagagg

SEQ ID NO: 5957 - DNA, 301 bp, Unknown; identical to SEQ ID NO: 5915
  Ascusbbf_8480B, encodes 16S rRNA

SEQ ID NO: 5958 - DNA, 300 bp, Unknown
  Ascusbbf_374B, encodes 16S rRNA
agagtttgatcctggctcaggatgaacgctagctacaggcttaacacatgcaagtcgaggggcagcatagcggaagcttgcttctgctgatggcgaccggcgcacgggtgagtaacgcgtatccaaccttccctacagtaggggatagcccggcgaaagtcggattaataccctatgttcttcttcgatgacatctgacgagaagcaaaggttcaccgctataggatggggatgcgtctgattagcttgttggcggggtaacggcccaccaaggctacgatcagtaggggttctgagagg

SEQ ID NO: 5959 - DNA, 300 bp, Unknown
  Ascusbbf_6906A, encodes 16S rRNA
agagtttgatcatggctcaggatgaacgctagctacaggcttaacacatgcaagtcgaggggcagcgaagagttagcttgctaattctgtcggcgaccggcgcacgggtgagtaacgcgtatccaaccttccccttagtagggcatagcccggcgaaagtcggattaataccctatgttgttcatcgcaggcatctaaagtgaaccaaagatttattgctaagggatggggatgcgtctgattaggttgttggcggggtaacggcccaccaagccttcgatcagtaggggttctgagagg

SEQ ID NO: 5960 - DNA, 300 bp, Unknown
  Ascusbbf_6906B, encodes 16S rRNA
agagttgatcctggctcgggatgaacgctagctacaggcttaacacatgcaagtcgaggggcagcgaagagttagcttgctaattctgtcggcgaccggcgcacgggtgagtaacgcgtatccaaccttccccttagtagggcatagcccggcgaaagtcggattaataccctatgttgttcatcgcaggcatctaaagtgaaccaaagatttattgctaagggatggggatgcgtctgattaggttgttggcggggtaacggcccaccaagccatcgatcagtaggggttctgagagga

SEQ ID NO: 5961 - DNA, 301 bp, Unknown
  Ascusbbf_6906D, encodes 16S rRNA
agagtttgatcctggctcaggatgaacgctagctacaggcttaacacatgcaagtcgaggggcagcgaagagttagcttgctaattctgtcggcgaccggcgcacgggtgagtaacgcgtatccaaccttccccttagtagggcatagcccggcgaaagtcggattaataccctatgttgttcatcgcaggcatctaaagtgaaccaaagatttattgctaagggatggggatgcgtctgattaggttgttggcggggtaacggcccaccaagccctcgatcagtaggggtcctgagagga

SEQ ID NO: 5962 - DNA, 300 bp, Unknown
  Ascusbbf_6906E, encodes 16S rRNA
agagtttgatcctggctcaggatgaacgctagctacaggcttaacacatgcaagtcgaggggcagcgaagagttagcttgctaattctgtcggcgaccggcgcacgggtgagtaacgcgtatccaaccttccccttagtagggcatagcccggcgaaagtcggattaataccctatgttgttcatcgcaggcatctaaagtgaaccaaagatttattgctaagggatggggatgcgtctgattaggttgttggcggggtaacggcccaccaagccctcgatcagtaggggttctgagagg

SEQ ID NO: 5963 - DNA, 300 bp, Unknown
  Ascusbbf_69K, encodes 16S rRNA
agagtttgatcctggctcaggatgaacgctagctacaggcttaacacatgcaagtcgaggggcagcatgatcgaagcttgctttgattgatggcgaccggcgcacgggtgagtaacgcgtatccaaccttccctatagtagagaatagcccggcgaaagtcggattaatgctctatgttgtatttagaggacatctgaagaataccaaaggtttaccgctataggatggggatgcgtctgattaggtagtaggcggggtaacggcccacctagccgacgatcagtaggggttctgagagg

SEQ ID NO: 5964 - DNA, 300 bp, Unknown
  Ascusbbf_69M, encodes 16S rRNA
agagtttgatcctggctcaggatgaacgctagctacaggcttaacacatgcaagtcgaggggcagcataacgaaagcttgcttttgttgatggcgaccggcgcacgggtgagtaacgcgtatccaaccttccctatagtagagaatagcccggcgaaagtcggattaatgctctatgttgtatttagaggacatctgaagaataccaaaggtttaccgctataggatggggatgcgtctgattaggtagtaggcggggtaacggcccacctagccgacgatcagtaggggttctgagagg

SEQ ID NO: 5965 - DNA, 300 bp, Unknown; identical to SEQ ID NO: 5812
  Ascusbbf_69N, encodes 16S rRNA

SEQ ID NO: 5966 - DNA, 300 bp, Unknown; identical to SEQ ID NO: 5813
  Ascusbbf_69O, encodes 16S rRNA

SEQ ID NO: 5967 - DNA, 300 bp, Unknown
  Ascusbbf_69P, encodes 16S rRNA
agagtttgatcctggctcaggatgaacgctagctacaggcttaacacatgcaagtcgaggggcagcataacgaaagcttgcttttgttgatggcgaccggcgcacgggtgagtaacgcgtatccaaccttccctatagtagagaatagcccggcgaaagtcggattaatgctctatgttgtatttagaggacatctgaagaataccaaaggtttaccgctataggatggggatgcgtctgattaggttgttggcggggtaacggcccaccaagcctacgatcagtaggggttctgagagg

SEQ ID NO: 5968 - DNA, 300 bp, Unknown
  Ascusbbf_721A, encodes 16S rRNA
agagtttgatcctggctcaggatgaacgctagctacaggcttaacacatgcaagtcgaggggcagcatgattctagcttgctagaattgatggcgaccggcgcacgggtgagtaacgcgtatccaaccttccctatagtagaggatagcccggcgaaagtcggattaatactctatgttgttcaatgcggacatctaagttgaaccaaaggtttaccgctataggatggggatgcgtctgattagatggtaggcggggtaacggcccacctagtcgacgatcagtaggggttctgagagg

SEQ ID NO: 5969 - DNA, 300 bp, Unknown
  Ascusbbf_721B, encodes 16S rRNA
agagtttgatcctggctcaggatgaacgctagctacaggcttaacacatgcaagtcgaggggcagcatgattctagcttgctagaattgatggcgaccggcgcacgggtgagtaacgcgtatccaaccttccctatagtagaggatagcccggcgaaagtcggattaatactctatgttttccaatgaggacatctgagctggaataaaggtttaccgctataggatggggatgcgtctgattagatggtaggcggggtaacggcccacctagtcgacgatcagtaggggttctgagagg

SEQ ID NO: 5970 - DNA, 300 bp, Unknown
  Ascusbbf_721C, encodes 16S rRNA
agagtttgatcatggctcaggatgaacgctagctacaggcttaacacatgcaagtcgaggggcagcatgattctagcttgctagaattgatggcgaccggcgcacgggtgagtaacgcgtatccaaccttccctatagtagaggatagcccggcgaaagtcggattaatactctatgttgttcaatgcggacatctaagttgaaccaaaggtttaccgctataggatggggatgcgtctgattagatggtaggcggggtaacggcccacctagtcgacgatcagtaggggttctgagagg

SEQ ID NO: 5971 - DNA, 301 bp, Unknown
  Ascusbbf_3819A, encodes 16S rRNA
agagtttgatcatggctcaggatgaacgctggcggcgtgcttaacacatgcaagtcgagcgaagctctcttgttgatttcttcggattgaaacaagagatgactgagcggcggacgggtgagtaacgcgtggagaacctgccccgtaccgggggataacagttagaaatgactgctaataccgcataagcgcacactatcgcatgatagagtgtgaaaaactccggtggtacgggatggctccgcgttggattagccagttggcggggtaacggcccaccaaagcgacgatccatagccgg

SEQ ID NO: 5972 - DNA, 301 bp, Unknown
  Ascusbbf_4323A, encodes 16S rRNA
agagtttgatcctggctcaggatgaacgctagctacaggcttaacacatgcaagtcgaggggcagcatgaaggtagcaatacctttgatggcgaccggcgcacgggtgcgtaacacgtatccaatctacccatggctcgggaatagcctttcgaaagaaagattaatgcccgatggtctgtgattgagacatctcgattacagtaaagatttatcggcgatggatgaggatgcgtccgattaggtagtaggcggggtaacggcccacctagccgacgatcggtaggggttctgagaggaag

SEQ ID NO: 5973 - DNA, 301 bp, Unknown; identical to SEQ ID NO: 5628
  Ascusbbf_4323B, encodes 16S rRNA

SEQ ID NO: 5974 - DNA, 301 bp, Unknown
  Ascusbbf_4323C, encodes 16S rRNA
agagtttgatcatggctcaggatgaacgctagctacaggcttaacacatgcaagtcgaggggcagcatgagggtagcaatacctttgatggcgaccggcgcacgggtgcgtaacacgtatccaatctacccatggctctgggatagcctttcgaaagaaagattaataccggatggtctgtgtttgagacatctcgaatgcagtaaagatttatcggcgatggatgaggatgcgtccgattaggtagtaggcggggtaacggcccacctagcctacgatcggtaggggttctgagaggaag

SEQ ID NO: 5975 - DNA, 301 bp, Unknown; identical to SEQ ID NO: 5630
  Ascusbbf_4323D, encodes 16S rRNA

SEQ ID NO: 5976 - DNA, 300 bp, Unknown
  Ascusbbf_6087A, encodes 16S rRNA
agagtttgatcatggctcaggatgaacgctagctacaggcttaacacatgcaagtcgaggggcagcaggattctagcttgctagaattgctggcgaccggcgcacgggtgagtaacgcgtatccaacctggcccttagtagaggatagcccggcgaaagtcggattaatactctatgttctccaatgcgggcatctaatttggagcaaagatttatcgctatgggatggggatgcgtctgattagcttgtcggcggggtaacggcccaccgaggcaacgatcagtaggggttctgagagg

SEQ ID NO: 5977 - DNA, 300 bp, Unknown; identical to SEQ ID NO: 5593
  Ascusbbf_6087B, encodes 16S rRNA

SEQ ID NO: 5978 - DNA, 300 bp, Unknown
  Ascusbbf_6087C, encodes 16S rRNA
agagtttgatcctggctcaggatgaacgctagctacaggcttaacacatgcaagtcgaggggcatcaggattctagcttgctaggattgctggcgaccggcgcacgggtgagtaacgcgtatccaacctggcccttagtagaggatagcccggcgaaagtcggattaatactctatgttctccaatgcgggcatctaatttggagcaaagatttatcgctatgggatggggatgcgtctgattagcttgtcggcggggtaacggcccaccgaggcaacgatcagtagggggtctgagagg

SEQ ID NO: 5979 - DNA, 300 bp, Unknown
  Ascusbbf_8414A, encodes 16S rRNA
agagtttgatcatggctcaggacgaacgctggcggcgtgcttaacacatgcaagtcgtgcgaggatgtgattggaaggtcttcggaccggaagattgcatccgagcggcggacgggtgagtaacgcgtgagcaacctgccttcaacagggggataacgcatcgaaagatgtgctaataccgcgtaagaccacggcatcacatggtgcaggggtcaaaggagcaatccggttgaagatgggctcgcgtccgattagccagttggtgaggtaacggcccaccaaagcaacgatcggtagccg

SEQ ID NO: 5980 - DNA, 227 bp, Unknown
  Ascusbbf_1372985G, encodes 16S rRNA
agagtttgatcatggctcagattgaacgctggcggcaggcctaacacatgcaagtcgaggggcatcgcggggtagcaataccctggcggcgaccggcgaaagggtgcgtaacgcgtgagcgacatgcccgtcacagggggataaccggcggaaacgccgcctaataccccatatgaggccaggccacatggccgggccttgaaagtcaaggcggtgacggattggct

SEQ ID NO: 5981 - DNA, 225 bp, Unknown
  Ascusbbf_1372985H, encodes 16S rRNA
agagtttgatcctggctcaggatgaacgctagcggcaggcttaacacatgcaagtcgaggggcatcgcggggtagcaataccctggcggcgaccggcgaaagggtgcgtaacgcgtgagcgacatgcccgtcacagggggataaccggcggaaacgccgcctaataccccatatgaggccaggccacatggctgggtcttgaaagtcaaggcggtgacggattgg

SEQ ID NO: 5982 - DNA, 214 bp, Unknown
  Ascusbbf_1372985J, encodes 16S rRNA
agagtttgatcatggctcaggatgaacgctagcggcaggcttaacacatgcaagtcgaggggcatcgcggggtagcaataccctggcggcgaccggcgaaagggtgcgtaacgcgtgagcgacatgcccgtcacagggggataaccggcggaaacgccgcctaataccccatatgaggccaggccacatggccgggccttgaaagtcaaggcgg

SEQ ID NO: 5983 - DNA, 214 bp, Unknown
  Ascusbbf_1372985K, encodes 16S rRNA
agagtttgatcctggctcaggatgaacgctagcggcaggcttaacacatgcaagtcgaggggcatcgcggggtagcaataccctggcggcgaccggcgaaagggtgcgtaacgcgtgagcgacatgcccgtcacagggggataaccggcggaaacgccgcctaataccccatatgaggccaggccacatggccgggccttgaaagtcaaggcgg

SEQ ID NO: 5984 - DNA, 217 bp, Unknown
  Ascusbbf_92G, encodes 16S rRNA
agagtttgatcatggctcaggatgaacgctggcggcgcgcctaacacatgcaagtcgaacggccggacccaccccggtgggcgaggcagtggcgaacggctgagtaacacgtgggcaacctgcccccctccccgggacagcctcgggaaaccgtgggtaataccggatagaccgccccctccgcatgggaggggcgggaaagctccggcgggggggg

SEQ ID NO: 5985 - DNA, 217 bp, Unknown
  Ascusbbf_92I, encodes 16S rRNA
agagtttgatcctggctcaggatgaacgctggcggcgcgcctaacacatgcaagtcgaacggccggacccacctcggtgggcgaggcagtggcgaacggctgagtaacacgtgggcaacctgcccccctccccgggacagcctcgggaaaccgtgggtaataccggatatgccgccccctccgcatgggaggggcgggaaagctccggcgggggggg

SEQ ID NO: 5986 - DNA, 217 bp, Unknown
  Ascusbbf_92J, encodes 16S rRNA
agagtttgatcatggctcaggatgaacgctggcggcgcgcctaacacatgcaagtcgaacggccggacccacctcggtgggcgaggcagtggcgaacggctgagtaacacgtgggcaacctgcccccctccccgggacagcctcgggaaaccgtgggtaataccggatactccgccccctccgcatgggaggggcgggaaagctccggcgggggggg

SEQ ID NO: 5987 - DNA, 300 bp, Unknown
  Ascusbbf_120A, encodes 16S rRNA
agagtttgatcctggctcaggatgaacgctagctacaggcttaacacatgcaagtcgaggggcagcatgatcgaagcttgctttgattgatggcgaccggcgcacgggtgagtaacgcgtatccaaccttccctatactagaggatagcccggcgaaagtcggattaatactctatgttcttcgtagatgacatctgaaatgaagcaaagatttatcggtataggatggggatgcgtctgattaggttgttggcggggtaacggcccaccaagcccgcgatcagtaggggttctgagagg

SEQ ID NO: 5988 - DNA, 300 bp, Unknown; identical to SEQ ID NO: 5443
  Ascusbbf_930B, encodes 16S rRNA

SEQ ID NO: 5989 - DNA, 301 bp, Unknown
  Ascusbbf_8480A, encodes 16S rRNA
agagtttgatcatggctcaggacgaacgctggcggcgtgcttaacacatgcaagtcgaacggagtgaaggggagcttgctccttggaacttagtggcaaacgggtgagtaacgcgtaggcaacctgcccttcagatggggacaacatttcgaaaggaatgctaataccgaatgacgtgcattggtcgcatgaccgatgtaccaaaggccgggcaaccggtcactgaaggatgggcctgcgtctgattagctagttggtggggtaacggcccaccaaggcgacgatcagtagccggtctgag

SEQ ID NO: 5990 - DNA, 300 bp, Unknown
  Ascusbbf_374A, encodes 16S rRNA
agagtttgatcatggctcaggatgaacgctagctacaggcttaacacatgcaagtcgaggggcagcatagcggaagcttgcttctgctgatggcgaccggcgcacgggtgagtaacgcgtatccaaccttccctacagtaggggatagcccggcgaaagtcggattaataccctatgttcttcttcgatgacatctgacgagaagcaaaggttcaccgctataggatggggatgcgtctgattagcttgttggcggggtaacggcccaccaaggcgacgatcagtaggggttctgagagg

SEQ ID NO: 5991 - DNA, 300 bp, Unknown
  Ascusbbf_374C, encodes 16S rRNA
agagtttgatcatggctcaggatgaacgctagctacaggcttaacacatgcaagtcgaggggcagcatagcggaagcttgcttctgctgatggcgaccggcgcacgggtgagtaacgcgtatccaaccttccctacagtaggggatagcccggcgaaagtcggattaataccctatgttcttcttcgatgacatctgacgagaagcaaaggttcaccgctataggatggggatgcgtctgattagcttgttggcggggtaacggcccaccaaggctacgatcagtaggggttctgagagg

SEQ ID NO: 5992 - DNA, 300 bp, Unknown
  Ascusbbf_6906C, encodes 16S rRNA
agagtttgatcctggctcaggatgaacgctagctacaggcttaacacatgcaagtcgaggggcagcgaagagttagcttgctaattctgtcggcgaccggcgcacgggtgagtaacgcgtatccaaccttccccttagtagggcatagcccggcgaaagtcggattaataccctatgttgttcatcgcaggcatctaaagtgaaccaaagatttattgctaagggatggggatgcgtctgattaggttgttggcggggtaacggcccaccaagccttcgatcagtaggggttctgagagg

SEQ ID NO: 5993 - DNA, 527 bp, Unknown
  Ascusbbf_69L, encodes 16S rRNA
agagtttgatcatggctcaggatgaacgctagctacaggcttaacacatgcaagtcgaggggcagcagatcgaaagcttgcttttgatgctggcgaccggcgcacgggtgagtaacgcgtatccaaccttccctatagtagagaatagcccggcgaaagtcgaattaatgctctatgttgtatttagaagacatctgaagaataccaaaggtttaccgctataggatggggatgcgtctgattaggtagtaggcggggtaacggcccacctagccgacgatcagtaggggttctgagaggaaggtcccccacattggaactgagacacggtccaaactcctacgggaggcagcagtgaggaatattggtcaatggacggaagtctgaaccagccaagtagcgtgcaggatgacggccctatgggttgtaaactgcttttatatagggataaagtcggggacgtgtccccgtttgtaggtactatatgaataaggaccggctaattccgtgccagcagccgcggtaat

SEQ ID NO: 5994 - DNA, 1525 bp, Unknown
  Chordicoccus furentiruminis
aatccttaagagagttcgatcctggctcaggatgaacgctggcggcgtgcctaacacatgcaagtcgagcggagtgaagagagcttgcttttttcactcagcggcggatgggtgaggaacgcgtggggaacctgcctctcacagggggataacagctggaaacggctgttaataccgcatatgcacacagtgccgcatggcacagggtggaaagaaattcggtgagagatggacccgcgttggattagcttgttggcggggtaacggcccaccaaggcgatgatccatagccggcctgagagggcgaccggccacattgggactgagacacggcccaaactcctacgggaggcagcagtgggggatattgcacaatggaggaaactctgatgcagcgacgccgcgtgaaggaagacgtgcttcggcatgtaaacttctatcagcagggaagaagatgacggtacctgactaagaagccccggctaactacgtgccagcagccgcggtaatacgtagggggcaagcgttatccggatttactgggtgtaaagggagcgtagacggtgatgcaagtctgatgtgaaaccccggggcttaactccgggcttgcattggaaactgtaccacttgagtactggaggggcaggcggaattcctggtgtagcggtgaaatgcgtagatatcaggaagaacaccggtggcgaaggcggcctgctggacagtaactgacgttgaggctcgaaagcgtggggagcaaacaggattagataccctggtagtccacgccctaaacgatgaataccaggtgtcggcagctgagagctgtcggtgccgcagcaaacgcagtaagtattccacctggggagtacgttcgcaagaatgaaactcaaaggaattgacggggacccgcacaagcggtggagcatgtggtttaattcgaagcaacgcgaagaaccttaccaaatcttgacatcccggtgacagattcagaaatgagtcctttcttcggaacaccggagacaggtggtgcatggttgtcgtcagctcgtgtcgtgagatgttgggtcaagtcccgcaacgagcgcaacccttgtcctcagtagccagcaggtaaagccgggcactctgaggagaccgccagggacaacctggaggaagatggggatgacgtcaaatcatcatgccccttatgatttgggctacacacgtgctacaatggtgtcggacaaagggaagcaaacccgcgagggggagcgaatcccacaaacggcatcccagttcggactgcactctgcaacccgggtgcacgaagctggaatcgctagtaatcgcagatcagcatgctgcggtgaatacgttcccgggtcttgtacacaccgcccgtcacaccatgggagtccgcaacacccgaaatcagtggcccaacccgcaggggagggagctgctgaaggtggggcgaatgactggggtgaagtcgtaacaaggtagccgtatcggaaggtgcggctggatcacctcctttcta

SEQ ID NO: 5995 - DNA, 225 bp, Unknown
  Chordicoccus furentiruminis
agagttcgatcctggctcaggatgaacgctggcggcgtgcctaacacatgcaagtcgagcggagtgaagagagcttgcttttttcactcagcggcggatgggtgaggaacgcgtggggaacctgcctctcacagggggataacagctggaaacggctgttaataccgcatatgcacacagtgccgcatggcacagggtggaaagaaattcggtgagagatggacc
